(19) United States
(12) Patent Application Publication
(10) Pub. No.: US 2004/0229779 A1
(43) Pub. Date: Nov. 18, 2004

(54) Therapeutic polypeptides, nucleic acids encoding same, and methods of use

(76) Inventors: Ramesh Kekuda, Stamford, CT (US); Uriel Malyankar, North Branford, CT (US); Li Li, Branford, CT (US); David Anderson, Plantsville, CT (US); Xiaojia (Sasha) Guo, Branford, CT (US); Mei Zhong, Branford, CT (US); Muralidhara Padigaru, Branford, CT (US); Stacie Casman, North Haven, CT (US); Ferenc Boldog, North Haven, CT (US); Charles Miller, Guilford, CT (US); Nikolai Khramtsov, Branford, CT (US); Corine Vernet, Chernex (CH); Meera Patturajan, Branford, CT (US)

Correspondence Address: MINTZ, LEVIN, COHN, FERRIS, GLOVSKY, AND POPEO, P.C., ONE FINANCIAL CENTER, BOSTON, MA, 02111, US

(21) Appl. No.: 10/637,313

(22) Filed: Aug. 8, 2003

Related U.S. Application Data
(63) Continuation-in-part of application No. 10/162,335, filed on Jun. 3, 2002.
(63) Continuation-in-part of application No. 10/211,689, filed on Aug. 1, 2002.
(63) Continuation-in-part of application No. 09/569,269, filed on May 11, 2000.
(63) Continuation-in-part of application No. 09/954,342, filed on Sep. 17, 2001, now abandoned.
(60) Provisional application No. 60/295,607, filed on Jun. 4, 2001.
(60) Provisional application No. 60/295,661, filed on Jun. 4, 2001.
(60) Provisional application No. 60/296,404, filed on Jun. 6, 2001.
(60) Provisional application No. 60/296,418, filed on Jun. 6, 2001.
(60) Provisional application No. 60/297,414, filed on Jun. 11, 2001.
(60) Provisional application No. 60/297,567, filed on Jun. 12, 2001.
(60) Provisional application No. 60/298,285, filed on Jun. 14, 2001.
(60) Provisional application No. 60/298,556, filed on Jun. 15, 2001.
(60) Provisional application No. 60/299,949, filed on Jun. 21, 2001.
(60) Provisional application No. 60/300,883, filed on Jun. 26, 2001.
(60) Provisional application No. 60/301,550, filed on Jun. 28, 2001.
(60) Provisional application No. 60/311,972, filed on Aug. 13, 2001.
(60) Provisional application No. 60/315,069, filed on Aug. 27, 2001.
(60) Provisional application No. 60/311,751, filed on Aug. 10, 2001.
(60) Provisional application No. 60/310,802, filed on Aug. 8, 2001.
(60) Provisional application No. 60/310,795, filed on Aug. 8, 2001.
(60) Provisional application No. 60/311,292, filed on Aug. 9, 2001.
(60) Provisional application No. 60/361,159, filed on Feb. 28, 2002.
(60) Provisional application No. 60/373,050, filed on Apr. 16, 2002.
(60) Provisional application No. 60/380,970, filed on May 15, 2002.
(60) Provisional application No. 60/311,979, filed on Aug. 13, 2001.
(60) Provisional application No. 60/381,030, filed on May 16, 2002.
(60) Provisional application No. 60/323,944, filed on Sep. 21, 2001.
(60) Provisional application No. 60/311,571, filed on Aug. 10, 2001.
(60) Provisional application No. 60/311,594, filed on Aug. 10, 2001.
(60) Provisional application No. 60/313,201, filed on Aug. 17, 2001.
(60) Provisional application No. 60/359,294, filed on Feb. 21, 2002.
(60) Provisional application No. 60/372,998, filed on Apr. 16, 2002.
(60) Provisional application No. 60/380,971, filed on May 15, 2002.
(60) Provisional application No. 60/312,892, filed on Aug. 16, 2001.
(60) Provisional application No. 60/322,716, filed on Sep. 17, 2001.
(60) Provisional application No. 60/360,890, filed on Feb. 28, 2002.
(60) Provisional application No. 60/314,031, filed on Aug. 21, 2001.
(60) Provisional application No. 60/315,853, filed on Aug. 29, 2001.
(60) Provisional application No. 60/134,315, filed on May 14, 1999.
(60) Provisional application No. 60/175,744, filed on Jan. 12, 2000.
(60) Provisional application No. 60/188,274, filed on Mar. 10, 2000.
(60) Provisional application No. 60/233,382, filed on Sep. 18, 2000.
(60) Provisional application No. 60/240,498, filed on Oct. 13, 2000.
(60) Provisional application No. 60/260,284, filed on Jan. 8, 2001.
(60) Provisional application No. 60/260,973, filed on Jan. 11, 2001.
(60) Provisional application No. 60/264,794, filed on Jan. 29, 2001.
(60) Provisional application No. 60/238,398, filed on Oct. 6, 2000.
(60) Provisional application No. 60/232,675, filed on Sep. 15, 2000.
(60) Provisional application No. 60/274,862, filed on Mar. 9, 2001.
(60) Provisional application No. 60/233,801, filed on Sep. 19, 2000.
(60) Provisional application No. 60/232,676, filed on Sep. 15, 2000.
(60) Provisional application No. 60/233,960, filed on Sep. 20, 2000.
(60) Provisional application No. 60/233,402, filed on Sep. 18, 2000.
(60) Provisional application No. 60/233,521, filed on Sep. 19, 2000.
(60) Provisional application No. 60/233,522, filed on Sep. 19, 2000.
(60) Provisional application No. 60/232,679, filed on Sep. 15, 2000.

(51) Int. Cl. A61K 38/17; C07K 14/47

(52) U.S. Cl. 514/12; 530/350

(57) ABSTRACT

Disclosed herein are nucleic acid sequences that encode novel polypeptides. Also disclosed are polypeptides encoded by these nucleic acid sequences, and antibodies that immunospecifically bind to the polypeptide, as well as derivatives, variants, mutants, or fragments of the novel polypeptide, polynucleotide, or antibody specific to the polypeptide. The invention further discloses therapeutic, diagnostic and research methods for diagnosis, treatment, and prevention of disorders involving any one of these novel human nucleic acids and proteins.

### RELATED APPLICATIONS

[0001] This application is a continuation in part of U.S. Ser. No. 10/162335, filed Jun. 3, 2002, which claims priority to U.S.S.N. 60/295607, filed Jun. 4, 2001; U.S.S.N. 60/295661, filed Jun. 4, 2001; U.S.S.N. 60/296404, filed Jun. 6, 2001; U.S.S.N. 60/296418, filed Jun. 6, 2001; U.S.S.N. 60/298285, filed Jun. 14, 2001; U.S.S.N. 60/298556, filed Jun. 15, 2001; U.S.S.N. 60/299949, filed Jun. 21, 2001; U.S.S.N. 60/300883, filed Jun. 26, 2001; U.S.S.N. 60/301550, filed Jun. 28, 2001; U.S.S.N. 60/311972, filed Aug. 13, 2001; U.S.S.N. 60/315071, filed Aug. 27, 2001; U.S.S.N. 60/315660, filed Aug. 29, 2001; U.S.S.N. 60/322293, filed Sep. 14, 2001; U.S.S.N. 60/322706, filed Sep. 17, 2001; U.S.S.N. 60/341186, filed Dec. 14, 2001; U.S.S.N. 60/361189, filed Feb. 28, 2001; U.S.S.N. 60/363673, filed Mar. 12, 2001; U.S.S.N. 60/363676, filed Mar. 12, 2002; U.S.S.N. 60/297414, filed Jun. 11, 2001; U.S.S.N. 60/297567, filed Jun. 12, 2001; and U.S.S.N. 60/315069, filed Aug. 27, 2001; a continuation in part of U.S. Ser. No. 10/211689, filed Aug. 1, 2002, which claims priority to U.S.S.N. 60/311751, filed Aug. 10, 2001; U.S.S.N. 60/310802, filed Aug. 8, 2001; U.S.S.N. 60/310795, filed Aug. 8, 2001; U.S.S.N. 60/311292, filed Aug. 9, 2001; U.S.S.N. 60/361159, filed Feb. 28, 2002; U.S.S.N. 60/373050, filed Apr. 16, 2002; U.S.S.N. 60/380970, filed May 15, 2002; U.S.S.N. 60/311979, filed Aug. 13, 2001; U.S.S.N. 60/381030, filed May 16, 2002; U.S.S.N. 60/323944, filed Sep. 21, 2001; U.S.S.N. 60/311571, filed Aug. 10, 2001; U.S.S.N. 60/311594, filed Aug. 10, 2001; U.S.S.N. 60/313201, filed Aug. 17, 2001; U.S.S.N. 60/359294, filed Feb. 21, 2002; U.S.S.N. 60/372998, filed Apr. 16, 2002; U.S.S.N. 60/380971, filed May 15, 2002; U.S.S.N. 60/312892, filed Aug. 16, 2001; U.S.S.N. 60/322716, filed Sep. 17, 2001; U.S.S.N. 60/360890, filed Feb. 28, 2002; U.S.S.N. 60/314031, filed Aug. 21, 2001; and U.S.S.N. 60/315853, filed Aug. 29, 2001; a continuation in part of U.S. Ser. No. 09/569269, filed May 11, 2000, which claims priority to U.S.S.N. 60/134315, filed May 14, 1999; U.S.S.N. 60/175744, filed Jan. 12, 2000; and U.S.S.N. 60/188274, filed Mar. 10, 2000; a continuation in part of U.S. Ser. No. 09/954342, filed Sep. 17, 2001, which claims priority to U.S.S.N. 60/233382, filed Sep. 18, 2000; U.S.S.N. 60/240,498, filed Oct. 13, 2000; U.S.S.N. 60/260,284, filed Jan. 8, 2001; U.S.S.N. 60/260,973, filed Jan. 11, 2001; U.S.S.N. 60/264,794, filed Jan. 29, 2001; U.S.S.N. 60/238,398, filed Oct. 6, 2000; U.S.S.N. 60/232,675, filed Sep. 15, 2000; U.S.S.N. 60/274,862, filed Mar. 9, 2001; U.S.S.N. 60/233,801, filed Sep. 19, 2000; U.S.S.N. 60/232,676, filed Sep. 15, 2000; U.S.S.N. 60/233,960, filed Sep. 20, 2000; U.S.S.N. 60/233,402, filed Sep. 18, 2000; U.S.S.N. 60/233,521, filed Sep. 19, 2000; U.S.S.N. 60/233,522, filed Sep. 19, 2000; and U.S.S.N. 60/232,679, filed Sep. 15, 2000 and a continuation in part of U.S. Ser. No. 10/379747, filed Mar. 5, 2003, which claims priority to U.S.S.N. 60/403485, filed Aug. 13, 2002; U.S.S.N. 60/365034 filed Mar. 15, 2002; U.S.S.N. 60/366420 filed Mar. 21, 2002; and U.S.S.N. 60/365477 filed Mar. 19, 2002; and this application also claims priority to U.S.S.N. 60/403485, filed Aug. 13, 2002; U.S.S.N. 60/414996, filed Sep. 30, 2002; U.S.S.N. 60/403815, filed Aug. 15, 2002; U.S.S.N. 60/425563, filed Nov. 12, 2002; U.S.S.N. 60/412995, filed Sep. 23, 2002; U.S.S.N. 60/403260, filed Aug. 14, 2002; U.S.S.N. 60/404190, filed Aug. 16, 2002; U.S.S.N. 60/402205, filed Aug. 9, 2002; U.S.S.N. 60/403398, filed Aug. 13, 2002; and U.S.S.N. 60/403517, filed Aug. 13, 2002. The contents of these applications are incorporated herein in their entirety.

### FIELD OF THE INVENTION

[0002] The present invention relates to novel polypeptides, and the nucleic acids encoding them, having properties related to stimulation of biochemical or physiological responses in a cell, a tissue, an organ or an organism. More particularly, the novel polypeptides are gene products of novel genes, or are specified biologically active fragments or derivatives thereof. Methods of use encompass diagnostic and prognostic assay procedures as well as methods of treating diverse pathological conditions.

### BACKGROUND OF THE INVENTION

[0003] Eukaryotic cells are characterized by biochemical and physiological processes, which under normal conditions are exquisitely balanced to achieve the preservation and propagation of the cells. When such cells are components of multicellular organisms such as vertebrates or, more particularly, organisms such as mammals, the regulation of the biochemical and physiological processes involves intricate signaling pathways. Frequently, such signaling pathways involve extracellular signaling proteins, cellular receptors that bind the signaling proteins and signal transducing components located within the cells.

[0004] Signaling proteins may be classified as endocrine effectors, paracrine effectors or autocrine effectors. Endocrine effectors are signaling molecules secreted by a given organ into the circulatory system, which are then transported to a distant target organ or tissue. The target cells include the receptors for the endocrine effector, and when the endocrine effector binds, a signaling cascade is induced. Paracrine effectors involve secreting cells and receptor cells in close proximity to each other, for example, two different classes of cells in the same tissue or organ. One class of cells secretes the paracrine effector, which then reaches the second class of cells, for example by diffusion through the extracellular fluid. The second class of cells contains the receptors for the paracrine effector; binding of the effector results in induction of the signaling cascade that elicits the corresponding biochemical or physiological effect. Autocrine effectors are highly analogous to paracrine effectors, except that the same cell type that secretes the autocrine effector also contains the receptor. Thus the autocrine effector binds to receptors on the same cell, or on identical neighboring cells. The binding process then elicits the characteristic biochemical or physiological effect.

[0005] Signaling processes may elicit a variety of effects on cells and tissues including, by way of nonlimiting example, induction of cell or tissue proliferation, suppression of growth or proliferation, induction of differentiation or maturation of a cell or tissue, and suppression of differentiation or maturation of a cell or tissue.

[0006] Many pathological conditions involve dysregulation of expression of important effector proteins. In certain classes of pathologies the dysregulation is manifested as diminished or suppressed level of synthesis and secretion of protein effectors. In other classes of pathologies the dysregulation is manifested as increased or up-regulated level of synthesis and secretion of protein effectors. In a clinical setting a subject may be suspected of suffering from a condition brought on by altered or mis-regulated levels of a protein effector of interest. Therefore there is a need to assay for the level of the protein effector of interest in a biological sample from such a subject, and to compare the level with that characteristic of a nonpathological condition. There also is a need to provide the protein effector as a product of manufacture. Administration of the effector to a subject in need thereof is useful in treatment of the pathological condition. Accordingly, there is a need for a method of treatment of a pathological condition brought on by a diminished or suppressed levels of the protein effector of interest. In addition, there is a need for a method of treatment of a pathological condition brought on by a increased or up-regulated levels of the protein effector of interest.

[0007] Antibodies are multichain proteins that bind specifically to a given antigen, and bind poorly, or not at all, to substances deemed not to be cognate antigens. Antibodies are comprised of two short chains termed light chains and two long chains termed heavy chains. These chains are constituted of immunoglobulin domains, of which generally there are two classes: one variable domain per chain, one constant domain in light chains, and three or more constant domains in heavy chains. The antigen-specific portion of the immunoglobulin molecules resides in the variable domains; the variable domains of one light chain and one heavy chain associate with each other to generate the antigen-binding moiety. Antibodies that bind immunospecifically to a cognate or target antigen bind with high affinities. Accordingly, they are useful in assaying specifically for the presence of the antigen in a sample. In addition, they have the potential of inactivating the activity of the antigen.

[0008] Therefore there is a need to assay for the level of a protein effector of interest in a biological sample from such a subject, and to compare this level with that characteristic of a nonpathological condition. In particular, there is a need for such an assay based on the use of an antibody that binds immunospecifically to the antigen. There further is a need to inhibit the activity of the protein effector in cases where a pathological condition arises from elevated or excessive levels of the effector based on the use of an antibody that binds immunospecifically to the effector. Thus, there is a need for the antibody as a product of manufacture. There further is a need for a method of treatment of a pathological condition brought on by an elevated or excessive level of the protein effector of interest based on administering the antibody to the subject.

### SUMMARY OF THE INVENTION

[0009] The invention is based in part upon the discovery of isolated polypeptides including amino acid sequences selected from mature forms of the amino acid sequences selected from the group consisting of SEQ ID NO:2n, wherein n is an integer between 1 and 102. The novel nucleic acids and polypeptides are referred to herein as NOVX, or NOV1, NOV2, NOV3, etc., nucleic acids and polypeptides. These nucleic acids and polypeptides, as well as derivatives, homologs, analogs and fragments thereof, will hereinafter be collectively designated as “NOVX” nucleic acid or polypeptide sequences.

[0010] The invention also is based in part upon variants of a mature form of the amino acid sequence selected from the group consisting of SEQ ID NO:2n, wherein n is an integer between 1 and 102, wherein any amino acid in the mature form is changed to a different amino acid, provided that no more than 15% of the amino acid residues in the sequence of the mature form are so changed. In another embodiment, the invention includes the amino acid sequences selected from the group consisting of SEQ ID NO:2n, wherein n is an integer between 1 and 102. In another embodiment, the invention also comprises variants of the amino acid sequence selected from the group consisting of SEQ ID NO:2n, wherein n is an integer between 1 and 102, wherein any amino acid specified in the chosen sequence is changed to a different amino acid, provided that no more than 15% of the amino acid residues in the sequence are so changed. The invention also involves fragments of any of the mature forms of the amino acid sequences selected from the group consisting of SEQ ID NO:2n, wherein n is an integer between 1 and 102, or any other amino acid sequence selected from this group. The invention also comprises fragments from these groups in which up to 15% of the residues are changed.

[0011] In another embodiment, the invention encompasses polypeptides that are naturally occurring allelic variants of the sequence selected from the group consisting of SEQ ID NO:2n, wherein n is an integer between 1 and 102. These allelic variants include amino acid sequences that are the translations of nucleic acid sequences differing by a single nucleotide from nucleic acid sequences selected from the group consisting of SEQ ID NOS: 2n−1, wherein n is an integer between 1 and 102. The variant polypeptide where any amino acid changed in the chosen sequence is changed to provide a conservative substitution.

[0012] In another embodiment, the invention comprises a pharmaceutical composition involving a polypeptide with an amino acid sequence selected from the group consisting of SEQ ID NO:2n, wherein n is an integer between 1 and 102, and a pharmaceutically acceptable carrier. In another embodiment, the invention involves a kit, including, in one or more containers, this pharmaceutical composition.

[0013] In another embodiment, the invention includes the use of a therapeutic in the manufacture of a medicament for treating a syndrome associated with a human disease, the disease being selected from a pathology associated with a polypeptide with an amino acid sequence selected from the group consisting of SEQ ID NO:2n, wherein n is an integer between 1 and 102, wherein said therapeutic is the polypeptide selected from this group.

[0014] In another embodiment, the invention comprises a method for determining the presence or amount of a polypeptide with an amino acid sequence selected from the group consisting of SEQ ID NO:2n, wherein n is an integer between 1 and 102, in a sample, the method involving providing the sample; introducing the sample to an antibody that binds immunospecifically to the polypeptide; and determining the presence or amount of antibody bound to the polypeptide, thereby determining the presence or amount of polypeptide in the sample.

[0015] In another embodiment, the invention includes a method for determining the presence of or predisposition to a disease associated with altered levels of a polypeptide with an amino acid sequence selected from the group consisting of SEQ ID NO:2n, wherein n is an integer between 1 and 102, in a first mammalian subject, the method involving measuring the level of expression of the polypeptide in a sample from the first mammalian subject; and comparing the amount of the polypeptide in this sample to the amount of the polypeptide present in a control sample from a second mammalian subject known not to have, or not to be predisposed to, the disease, wherein an alteration in the expression level of the polypeptide in the first subject as compared to the control sample indicates the presence of or predisposition to the disease.

[0016] In another embodiment, the invention involves a method of identifying an agent that binds to a polypeptide with an amino acid sequence selected from the group consisting of SEQ ID NO:2n, wherein n is an integer between 1 and 102, the method including introducing the polypeptide to the agent; and determining whether the agent binds to the polypeptide. The agent could be a cellular receptor or a downstream effector.

[0017] In another embodiment, the invention involves a method for identifying a potential therapeutic agent for use in treatment of a pathology, wherein the pathology is related to aberrant expression or aberrant physiological interactions of a polypeptide with an amino acid sequence selected from the group consisting of SEQ ID NO:2n, wherein n is an integer between 1 and 102, the method including providing a cell expressing the polypeptide of the invention and having a property or function ascribable to the polypeptide; contacting the cell with a composition comprising a candidate substance; and determining whether the substance alters the property or function ascribable to the polypeptide; whereby, if an alteration observed in the presence of the substance is not observed when the cell is contacted with a composition devoid of the substance, the substance is identified as a potential therapeutic agent.

[0018] In another embodiment, the invention involves a method for screening for a modulator of activity or of latency or predisposition to a pathology associated with a polypeptide having an amino acid sequence selected from the group consisting of SEQ ID NO:2n, wherein n is an integer between 1 and 102, the method including administering a test compound to a test animal at increased risk for a pathology associated with the polypeptide of the invention, wherein the test animal recombinantly expresses the polypeptide of the invention; measuring the activity of the polypeptide in the test animal after administering the test compound; and comparing the activity of the protein in the test animal with the activity of the polypeptide in a control animal not administered the polypeptide, wherein a change in the activity of the polypeptide in the test animal relative to the control animal indicates the test compound is a modulator of latency of, or predisposition to, a pathology associated with the polypeptide of the invention. The recombinant test animal could express a test protein transgene or express the transgene under the control of a promoter at an increased level relative to a wild-type test animal The promoter may or may not b the native gene promoter of the transgene.

[0019] In another embodiment, the invention involves a method for modulating the activity of a polypeptide with an amino acid sequence selected from the group consisting of SEQ ID NO:2n, wherein n is an integer between 1 and 102, the method including introducing a cell sample expressing the polypeptide with a compound that binds to the polypeptide in an amount sufficient to modulate the activity of the polypeptide.

[0020] In another embodiment, the invention involves a method of treating or preventing a pathology associated with a polypeptide with an amino acid sequence selected from the group consisting of SEQ ID NO:2n, wherein n is an integer between 1 and 102, the method including administering the polypeptide to a subject in which such treatment or prevention is desired in an amount sufficient to treat or prevent the pathology in the subject. The subject could be human.

[0021] In another embodiment, the invention involves a method of treating a pathological state in a mammal, the method including administering to the mammal a polypeptide in an amount that is sufficient to alleviate the pathological state, wherein the polypeptide is a polypeptide having an amino acid sequence at least 95% identical to a polypeptide having the amino acid sequence selected from the group consisting of SEQ ID NO:2n, wherein n is an integer between 1 and 102, or a biologically active fragment thereof.

[0022] In another embodiment, the invention involves an isolated nucleic acid molecule comprising a nucleic acid sequence encoding a polypeptide having an amino acid sequence selected from the group consisting of a mature form of the amino acid sequence given SEQ ID NO:2n, wherein n is an integer between 1 and 102, a variant of a mature form of the amino acid sequence selected from the group consisting of SEQ ID NO:2n, wherein n is an integer between 1 and 102, wherein any amino acid in the mature form of the chosen sequence is changed to a different amino acid, provided that no more than 15% of the amino acid residues in the sequence of the mature form are so changed; the amino acid sequence selected from the group consisting of SEQ ID NO:2n, wherein n is an integer between 1 and 102, a variant of the amino acid sequence selected from the group consisting of SEQ ID NO:2n, wherein n is an integer between 1 and 102, in which any amino acid specified in the chosen sequence is changed to a different amino acid, provided that no more than 15% of the amino acid residues in the sequence are so changed; a nucleic acid fragment encoding at least a portion of a polypeptide comprising the amino acid sequence selected from the group consisting of SEQ ID NO:2n, wherein n is an integer between 1 and 102, or any variant of the polypeptide wherein any amino acid of the chosen sequence is changed to a different amino acid, provided that no more than 10% of the amino acid residues in the sequence are so changed; and the complement of any of the nucleic acid molecules.

[0023] In another embodiment, the invention comprises an isolated nucleic acid molecule having a nucleic acid sequence encoding a polypeptide comprising an amino acid sequence selected from the group consisting of a mature form of the amino acid sequence given SEQ ID NO:2n, wherein n is an integer between 1 and 102, wherein the nucleic acid molecule comprises the nucleotide sequence of a naturally occurring allelic nucleic acid variant.

[0024] In another embodiment, the invention involves an isolated nucleic acid molecule including a nucleic acid sequence encoding a polypeptide having an amino acid sequence selected from the group consisting of a mature form of the amino acid sequence given SEQ ID NO:2n, wherein n is an integer between 1 and 102, that encodes a variant polypeptide, wherein the variant polypeptide has the polypeptide sequence of a naturally occurring polypeptide variant.

[0025] In another embodiment, the invention comprises an isolated nucleic acid molecule having a nucleic acid sequence encoding a polypeptide comprising an amino acid sequence selected from the group consisting of a mature form of the amino acid sequence given SEQ ID NO:2n, wherein n is an integer between 1 and 102, wherein the nucleic acid molecule differs by a single nucleotide from a nucleic acid sequence selected from the group consisting of SEQ ID NOS: 2n−1, wherein n is an integer between 1 and 102.

[0026] In another embodiment, the invention includes an isolated nucleic acid molecule having a nucleic acid sequence encoding a polypeptide including an amino acid sequence selected from the group consisting of a mature form of the amino acid sequence given SEQ ID NO:2n, wherein n is an integer between 1 and 102, wherein the nucleic acid molecule comprises a nucleotide sequence selected from the group consisting of the nucleotide sequence selected from the group consisting of SEQ ID NO:2n−1, wherein n is an integer between 1 and 102, a nucleotide sequence wherein one or more nucleotides in the nucleotide sequence selected from the group consisting of SEQ ID NO:2n−1, wherein n is an integer between 1 and 102, is changed from that selected from the group consisting of the chosen sequence to a different nucleotide provided that no more than 15% of the nucleotides are so changed; a nucleic acid fragment of the sequence selected from the group consisting of SEQ ID NO:2n−1, wherein n is an integer between 1 and 102, and a nucleic acid fragment wherein one or more nucleotides in the nucleotide sequence selected from the group consisting of SEQ ID NO:2n−1, wherein n is an integer between 1 and 102, is changed from that selected from the group consisting of the chosen sequence to a different nucleotide provided that no more than 15% of the nucleotides are so changed.

[0027] In another embodiment, the invention includes an isolated nucleic acid molecule having a nucleic acid sequence encoding a polypeptide including an amino acid sequence selected from the group consisting of a mature form of the amino acid sequence given SEQ ID NO:2n, wherein n is an integer between 1 and 102, wherein the nucleic acid molecule hybridizes under stringent conditions to the nucleotide sequence selected from the group consisting of SEQ ID NO:2n−1, wherein n is an integer between 1 and 102, or a complement of the nucleotide sequence.

[0028] In another embodiment, the invention includes an isolated nucleic acid molecule having a nucleic acid sequence encoding a polypeptide including an amino acid sequence selected from the group consisting of a mature form of the amino acid sequence given SEQ ID NO:2n, wherein n is an integer between 1 and 102, wherein the nucleic acid molecule has a nucleotide sequence in which any nucleotide specified in the coding sequence of the chosen nucleotide sequence is changed from that selected from the group consisting of the chosen sequence to a different nucleotide provided that no more than 15% of the nucleotides in the chosen coding sequence are so changed, an isolated second polynucleotide that is a complement of the first polynucleotide, or a fragment of any of them.

[0029] In another embodiment, the invention includes a vector involving the nucleic acid molecule having a nucleic acid sequence encoding a polypeptide including an amino acid sequence selected from the group consisting of a mature form of the amino acid sequence given SEQ ID NO:2n, wherein n is an integer between 1 and 102. This vector can have a promoter operably linked to the nucleic acid molecule. This vector can be located within a cell.

[0030] In another embodiment, the invention involves a method for determining the presence or amount of a nucleic acid molecule having a nucleic acid sequence encoding a polypeptide including an amino acid sequence selected from the group consisting of a mature form of the amino acid sequence given SEQ ID NO:2n, wherein n is an integer between 1 and 102, in a sample, the method including providing the sample; introducing the sample to a probe that binds to the nucleic acid molecule; and determining the presence or amount of the probe bound to the nucleic acid molecule, thereby determining the presence or amount of the nucleic acid molecule in the sample. The presence or amount of the nucleic acid molecule is used as a marker for cell or tissue type. The cell type can be cancerous.

[0031] In another embodiment, the invention involves a method for determining the presence of or predisposition for a disease associated with altered levels of a nucleic acid molecule having a nucleic acid sequence encoding a polypeptide including an amino acid sequence selected from the group consisting of a mature form of the amino acid sequence given SEQ ID NO:2n, wherein n is an integer between 1 and 102, in a first mammalian subject, the method including measuring the amount of the nucleic acid in a sample from the first mammalian subject; and comparing the amount of the nucleic acid in the sample of step (a) to the amount of the nucleic acid present in a control sample from a second mammalian subject known not to have or not be predisposed to, the disease; wherein an alteration in the level of the nucleic acid in the first subject as compared to the control sample indicates the presence of or predisposition to the disease.

[0032] Unless otherwise defined, all technical and scientific terms used herein have the same meaning as commonly understood by one of ordinary skill in the art to which this invention belongs. Although methods and materials similar or equivalent to those described herein can be used in the practice or testing of the present invention, suitable methods and materials are described below. All publications, patent applications, patents, and other references mentioned herein are incorporated by reference in their entirety. In the case of conflict, the present specification, including definitions, will control. In addition, the materials, methods, and examples are illustrative only and are not intended to be limiting.

[0033] Other features and advantages of the invention will be apparent from the following detailed description and claims.

### DETAILED DESCRIPTION OF THE INVENTION

[0034] The present invention provides novel nucleotides and polypeptides encoded thereby. Included in the invention are the novel nucleic acid sequences, their encoded polypeptides, antibodies, and other related compounds. The sequences are collectively referred to herein as “NOVX nucleic acids” or “NOVX polynucleotides” and the corresponding encoded polypeptides are referred to as “NOVX polypeptides” or “NOVX proteins.” Unless indicated otherwise, “NOVX” is meant to refer to any of the novel sequences disclosed herein. Table A provides a summary of the NOVX nucleic acids and their encoded polypeptides.

TABLE A
Sequences and Corresponding SEQ ID Numbers

| NOVX | Internal | SEQ ID NO | SEQ ID NO | |
|---|---|---|---|---|
| Assignment | Identification | (nucleic acid) | (amino acid) | Homology |
| NOV1a | CG104903-09 | 1 | 2 | Kininogen precursor (Alpha-2- |
| | | | | thiol proteinase inhibitor) |
| | | | | [Contains: Bradykinin] - Homo |
| | | | | sapiens |
| NOV1b | CG104903-03 | 3 | 4 | Kininogen precursor (Alpha-2- |
| | | | | thiol proteinase inhibitor) |
| | | | | [Contains: Bradykinin] - Homo |
| | | | | sapiens |
| NOV1c | 316514816 | 5 | 6 | Kininogen precursor (Alpha-2- |
| | | | | thiol proteinase inhibitor) |
| | | | | [Contains: Bradykinin] - Homo |
| | | | | sapiens |
| NOV1d | 308780224 | 7 | 8 | Kininogen precursor (Alpha-2- |
| | | | | thiol proteinase inhibitor) |
| | | | | [Contains: Bradykinin] - Homo |
| | | | | sapiens |
| NOV1e | 308900326 | 9 | 10 | Kininogen precursor (Alpha-2- |
| | | | | thiol proteinase inhibitor) |
| | | | | [Contains: Bradykinin] - Homo |
| | | | | sapiens |
| NOV1f | 308900357 | 11 | 12 | Kininogen precursor (Alpha-2- |
| | | | | thiol proteinase inhibitor) |
| | | | | [Contains: Bradykinin] - Homo |
| | | | | sapiens |
| NOV1g | 319687415 | 13 | 14 | Kininogen precursor (Alpha-2- |
| | | | | thiol proteinase inhibitor) |
| | | | | [Contains: Bradykinin] - Homo |
| | | | | sapiens |
| NOV1h | CG104903-10 | 15 | 16 | Kininogen precursor (Alpha-2- |
| | | | | thiol proteinase inhibitor) |
| | | | | [Contains: Bradykinin] - Homo |
| | | | | sapiens |
| NOV1i | 311750024 | 17 | 18 | Kininogen precursor (Alpha-2- |
| | | | | thiol proteinase inhibitor) |
| | | | | [Contains: Bradykinin] - Homo |
| | | | | sapiens |
| NOV1j | CG104903-01 | 19 | 20 | Kininogen precursor (Alpha-2- |
| | | | | thiol proteinase inhibitor) |
| | | | | [Contains: Bradykinin] - Homo |
| | | | | sapiens |
| NOV1k | CG104903-02 | 21 | 22 | Kininogen precursor (Alpha-2- |
| | | | | thiol proteinase inhibitor) |
| | | | | [Contains: Bradykinin] - Homo |
| | | | | sapiens |
| NOV1l | CG104903-04 | 23 | 24 | Kininogen precursor (Alpha-2- |
| | | | | thiol proteinase inhibitor) |
| | | | | [Contains: Bradykinin] - Homo |
| | | | | sapiens |
| NOV1m | CG104903-05 | 25 | 26 | Kininogen precursor (Alpha-2- |
| | | | | thiol proteinase inhibitor) |
| | | | | [Contains: Bradykinin] - Homo |
| | | | | sapiens |
| NOV1n | CG104903-06 | 27 | 28 | Kininogen precursor (Alpha-2- |
| | | | | thiol proteinase inhibitor) |
| | | | | [Contains: Bradykinin] - Homo |
| | | | | sapiens |
| NOV1o | CG104903-07 | 29 | 30 | Kininogen precursor (Alpha-2- |
| | | | | thiol proteinase inhibitor) |
| | | | | [Contains: Bradykinin] - Homo |
| | | | | sapiens |
| NOV1p | CG104903-08 | 31 | 32 | Kininogen precursor (Alpha-2- |
| | | | | thiol proteinase inhibitor) |
| | | | | [Contains: Bradykinin] - Homo |
| | | | | sapiens |
| NOV1q | CG104903-11 | 33 | 34 | Kininogen precursor (Alpha-2- |
| | | | | thiol proteinase inhibitor) |
| | | | | [Contains: Bradykinin] - Homo |
| | | | | sapiens |
| NOV1r | CG104903-12 | 35 | 36 | Kininogen precursor (Alpha-2- |
| | | | | thiol proteinase inhibitor) |
| | | | | [Contains: Bradykinin] - Homo |
| | | | | sapiens |
| NOV1s | CG104903-13 | 37 | 38 | Kininogen precursor (Alpha-2- |
| | | | | thiol proteinase inhibitor) |
| | | | | [Contains: Bradykinin] - Homo |
| | | | | sapiens |
| NOV1t | CG104903-14 | 39 | 40 | Kininogen precursor (Alpha-2- |
| | | | | thiol proteinase inhibitor) |
| | | | | [Contains: Bradykinin] - Homo |
| | | | | sapiens |
| NOV1u | CG104903-15 | 41 | 42 | Kininogen precursor (Alpha-2- |
| | | | | thiol proteinase inhibitor) |
| | | | | [Contains: Bradykinin] - Homo |
| | | | | sapiens |
| NOV1v | CG104903-16 | 43 | 44 | Kininogen precursor (Alpha-2- |
| | | | | thiol proteinase inhibitor) |
| | | | | [Contains: Bradykinin] - Homo |
| | | | | sapiens |
| NOV1w | CG104903-17 | 45 | 46 | Kininogen precursor (Alpha-2- |
| | | | | thiol proteinase inhibitor) |
| | | | | [Contains: Bradykinin] - Homo |
| | | | | sapiens |
| NOV1x | CG104903-18 | 47 | 48 | Kininogen precursor (Alpha-2- |
| | | | | thiol proteinase inhibitor) |
| | | | | [Contains: Bradykinin] - Homo |
| | | | | sapiens |
| NOV1y | CG104903-19 | 49 | 50 | Kininogen precursor (Alpha-2- |
| | | | | thiol proteinase inhibitor) |
| | | | | [Contains: Bradykinin] - Homo |
| | | | | sapiens |
| NOV1z | CG104903-20 | 51 | 52 | Kininogen precursor (Alpha-2- |
| | | | | thiol proteinase inhibitor) |
| | | | | [Contains: Bradykinin] - Homo |
| | | | | sapiens |
| NOV1aa | SNP13381566 | 53 | 54 | Kininogen precursor (Alpha-2- |
| | | | | thiol proteinase inhibitor) |
| | | | | [Contains: Bradykinin] - Homo |
| | | | | sapiens |
| NOV1ab | SNP13379157 | 55 | 56 | Kininogen precursor (Alpha-2- |
| | | | | thiol proteinase inhibitor) |
| | | | | [Contains: Bradykinin] - Homo |
| | | | | sapiens |
| NOV1ac | SNP13379158 | 57 | 58 | Kininogen precursor (Alpha-2- |
| | | | | thiol proteinase inhibitor) |
| | | | | [Contains: Bradykinin] - Homo |
| | | | | sapiens |
| NOV1ad | SNP13379159 | 59 | 60 | Kininogen precursor (Alpha-2- |
| | | | | thiol proteinase inhibitor) |
| | | | | [Contains: Bradykinin] - Homo |
| | | | | sapiens |
| NOV1ae | SNP13375447 | 61 | 62 | Kininogen precursor (Alpha-2- |
| | | | | thiol proteinase inhibitor) |
| | | | | [Contains: Bradykinin] - Homo |
| | | | | sapiens |
| NOV1af | SNP13380032 | 63 | 64 | Kininogen precursor (Alpha-2- |
| | | | | thiol proteinase inhibitor) |
| | | | | [Contains: Bradykinin] - Homo |
| | | | | sapiens |
| NOV1ag | SNP13380035 | 65 | 66 | Kininogen precursor (Alpha-2- |
| | | | | thiol proteinase inhibitor) |
| | | | | [Contains: Bradykinin] - Homo |
| | | | | sapiens |
| NOV1ah | SNP13375317 | 67 | 68 | Kininogen precursor (Alpha-2- |
| | | | | thiol proteinase inhibitor) |
| | | | | [Contains: Bradykinin] - Homo |
| | | | | sapiens |
| NOV1ai | SNP13375316 | 69 | 70 | Kininogen precursor (Alpha-2- |
| | | | | thiol proteinase inhibitor) |
| | | | | [Contains: Bradykinin] - Homo |
| | | | | sapiens |
| NOV1aj | SNP13379639 | 71 | 72 | Kininogen precursor (Alpha-2- |
| | | | | thiol proteinase inhibitor) |
| | | | | [Contains: Bradykinin] - Homo |
| | | | | sapiens |
| NOV1ak | SNP13376277 | 73 | 74 | Kininogen precursor (Alpha-2- |
| | | | | thiol proteinase inhibitor) |
| | | | | [Contains: Bradykinin] - Homo |
| | | | | sapiens |
| NOV1al | SNP13379163 | 75 | 76 | Kininogen precursor (Alpha-2- |
| | | | | thiol proteinase inhibitor) |
| | | | | [Contains: Bradykinin] - Homo |
| | | | | sapiens |
| NOV2a | CG120844-02 | 77 | 78 | Interleukin 1, beta - Homo |
| | | | | sapiens |
| NOV2b | 251426189 | 79 | 80 | Interleukin 1, beta - Homo |
| | | | | sapiens |
| NOV2c | CG120844-01 | 81 | 82 | Interleukin 1, beta - Homo |
| | | | | sapiens |
| NOV2d | SNP13377796 | 83 | 84 | Interleukin 1, beta - Homo |
| | | | | sapiens |
| NOV2e | SNP13377795 | 85 | 86 | Interleukin 1, beta - Homo |
| | | | | sapiens |
| NOV2f | SNP13377794 | 87 | 88 | Interleukin 1, beta - Homo |
| | | | | sapiens |
| NOV2g | SNP13377793 | 89 | 90 | Interleukin 1, beta - Homo |
| | | | | sapiens |
| NOV2h | SNP13377781 | 91 | 92 | Interleukin 1, beta - Homo |
| | | | | sapiens |
| NOV2i | SNP13377792 | 93 | 94 | Interleukin 1, beta - Homo |
| | | | | sapiens |
| NOV3a | CG127616-01 | 95 | 96 | Erythropoietin precursor |
| | | | | (Epoetin) - Homo sapiens |
| NOV3b | CG127616-02 | 97 | 98 | Erythropoietin precursor |
| | | | | (Epoetin) - Homo sapiens |
| NOV3c | 227803412 | 99 | 100 | Erythropoietin precursor |
| | | | | (Epoetin) - Homo sapiens |
| NOV3d | CG127616-03 | 101 | 102 | Erythropoietin precursor |
| | | | | (Epoetin) - Homo sapiens |
| NOV3e | CG127616-04 | 103 | 104 | Erythropoietin precursor |
| | | | | (Epoetin) - Homo sapiens |
| NOV3f | CG127616-05 | 105 | 106 | Erythropoietin precursor |
| | | | | (Epoetin) - Homo sapiens |
| NOV3g | CG127616-06 | 107 | 108 | Erythropoietin precursor |
| | | | | (Epoetin) - Homo sapiens |
| NOV3h | CG127616-07 | 109 | 110 | Erythropoietin precursor |
| | | | | (Epoetin) - Homo sapiens |
| NOV3i | CG127616-08 | 111 | 112 | Erythropoietin precursor |
| | | | | (Epoetin) - Homo sapiens |
| NOV3j | CG127616-09 | 113 | 114 | Erythropoietin precursor |
| | | | | (Epoetin) - Homo sapiens |
| NOV4a | CG54455-03 | 115 | 116 | Fibroblast growth factor-22 |
| | | | | precursor (FGF-22) - Homo |
| | | | | sapiens |
| NOV4b | 260403849 | 117 | 118 | Fibroblast growth factor-22 |
| | | | | precursor (FGF-22) - Homo |
| | | | | sapiens |
| NOV4c | CG54455-07 | 119 | 120 | Fibroblast growth factor-22 |
| | | | | precursor (FGF-22) - Homo |
| | | | | sapiens |
| NOV4d | 306448506 | 121 | 122 | Fibroblast growth factor-22 |
| | | | | precursor (FGF-22) - Homo |
| | | | | sapiens |
| NOV4e | CG54455-01 | 123 | 124 | Fibroblast growth factor-22 |
| | | | | precursor (FGF-22) - Homo |
| | | | | sapiens |
| NOV4f | CG54455-02 | 125 | 126 | Fibroblast growth factor-22 |
| | | | | precursor (FGF-22) - Homo |
| | | | | sapiens |
| NOV4g | CG54455-04 | 127 | 128 | Fibroblast growth factor-22 |
| | | | | precursor (FGF-22) - Homo |
| | | | | sapiens |
| NOV4h | CG54455-05 | 129 | 130 | Fibroblast growth factor-22 |
| | | | | precursor (FGF-22) - Homo |
| | | | | sapiens |
| NOV4i | CG54455-06 | 131 | 132 | Fibroblast growth factor-22 |
| | | | | precursor (FGF-22) - Homo |
| | | | | sapiens |
| NOV4j | CG54455-08 | 133 | 134 | Fibroblast growth factor-22 |
| | | | | precursor (FGF-22) - Homo |
| | | | | sapiens |
| NOV4k | CG54455-09 | 135 | 136 | Fibroblast growth factor-22 |
| | | | | precursor (FGF-22) - Homo |
| | | | | sapiens |
| NOV4l | SNP13379002 | 137 | 138 | Fibroblast growth factor-22 |
| | | | | precursor (FGF-22) - Homo |
| | | | | sapiens |
| NOV5a | CG54611-06 | 139 | 140 | Wnt-3a protein precursor - |
| | | | | Homo sapiens |
| NOV5b | 283841210 | 141 | 142 | Wnt-3a protein precursor - |
| | | | | Homo sapiens |
| NOV5c | CG54611-01 | 143 | 144 | Wnt-3a protein precursor - |
| | | | | Homo sapiens |
| NOV5d | CG54611-02 | 145 | 146 | Wnt-3a protein precursor - |
| | | | | Homo sapiens |
| NOV5e | CG54611-03 | 147 | 148 | Wnt-3a protein precursor - |
| | | | | Homo sapiens |
| NOV5f | CG54611-04 | 149 | 150 | Wnt-3a protein precursor - |
| | | | | Homo sapiens |
| NOV5g | CG54611-05 | 151 | 152 | Wnt-3a protein precursor - |
| | | | | Homo sapiens |
| NOV5h | CG54611-07 | 153 | 154 | Wnt-3a protein precursor - |
| | | | | Homo sapiens |
| NOV5i | CG54611-08 | 155 | 156 | Wnt-3a protein precursor - |
| | | | | Homo sapiens |
| NOV5j | CG54611-09 | 157 | 158 | Wnt-3a protein precursor - |
| | | | | Homo sapiens |
| NOV5k | CG54611-10 | 159 | 160 | Wnt-3a protein precursor - |
| | | | | Homo sapiens |
| NOV5l | CG54611-11 | 161 | 162 | Wnt-3a protein precursor - |
| | | | | Homo sapiens |
| NOV5m | CG54611-12 | 163 | 164 | Wnt-3a protein precursor - |
| | | | | Homo sapiens |
| NOV5n | CG54611-13 | 165 | 166 | Wnt-3a protein precursor - |
| | | | | Homo sapiens |
| NOV5o | CG54611-14 | 167 | 168 | Wnt-3a protein precursor - |
| | | | | Homo sapiens |
| NOV5p | CG54611-15 | 169 | 170 | Wnt-3a protein precursor - |
| | | | | Homo sapiens |
| NOV5q | CG54611-16 | 171 | 172 | Wnt-3a protein precursor - |
| | | | | Homo sapiens |
| NOV5r | CG54611-17 | 173 | 174 | Wnt-3a protein precursor - |
| | | | | Homo sapiens |
| NOV5s | CG54611-18 | 175 | 176 | Wnt-3a protein precursor - |
| | | | | Homo sapiens |
| NOV5t | SNP13378438 | 177 | 178 | Wnt-3a protein precursor - |
| | | | | Homo sapiens |
| NOV5u | SNP13378437 | 179 | 180 | Wnt-3a protein precursor - |
| | | | | Homo sapiens |
| NOV5v | SNP13381548 | 181 | 182 | Wnt-3a protein precursor - |
| | | | | Homo sapiens |
| NOV5w | SNP13381645 | 183 | 184 | Wnt-3a protein precursor - |
| | | | | Homo sapiens |
| NOV5x | SNP13381646 | 185 | 186 | Wnt-3a protein precursor - |
| | | | | Homo sapiens |
| NOV5y | SNP13381647 | 187 | 188 | Wnt-3a protein precursor - |
| | | | | Homo sapiens |
| NOV5z | SNP13381648 | 189 | 190 | Wnt-3a protein precursor - |
| | | | | Homo sapiens |
| NOV5aa | SNP13381649 | 191 | 192 | Wnt-3a protein precursor - |
| | | | | Homo sapiens |
| NOV6a | CG92035-02 | 193 | 194 | C1q-related factor precursor - |
| | | | | Homo sapiens |
| NOV6b | 214458541 | 195 | 196 | C1q-related factor precursor - |
| | | | | Homo sapiens |
| NOV6c | 214458545 | 197 | 198 | C1q-related factor precursor - |
| | | | | Homo sapiens |
| NOV6d | 214458564 | 199 | 200 | C1q-related factor precursor - |
| | | | | Homo sapiens |
| NOV6e | CG92035-01 | 201 | 202 | C1q-related factor precursor - |
| | | | | Homo sapiens |
| NOV6f | CG92035-03 | 203 | 204 | C1q-related factor precursor - |
| | | | | Homo sapiens |

[0035] Table A indicates the homology of NOVX polypeptides to known protein families. Thus, the nucleic acids and polypeptides, antibodies and related compounds according to the invention corresponding to a NOVX as identified in column 1 of Table A will be useful in therapeutic and diagnostic applications implicated in, for example, pathologies and disorders associated with the known protein families identified in column 5 of Table A.

[0036] Pathologies, diseases, disorders, conditions and the like that are associated with NOVX sequences include, but are not limited to, e.g., cardiomyopathy, atherosclerosis, hypertension, congenital heart defects, aortic stenosis, atrial septal defect (ASD), atrioventricular (A-V) canal defect, ductus arteriosus, pulmonary stenosis, subaortic stenosis, ventricular septal defect (VSD), valve diseases, tuberous sclerosis, scleroderma, obesity, metabolic disturbances associated with obesity, transplantation, adrenoleukodystrophy, congenital adrenal hyperplasia, prostate cancer, diabetes, metabolic disorders, neoplasm; adenocarcinoma, lymphoma, uterus cancer, fertility, hemophilia, hypercoagulation, idiopathic thrombocytopenic purpura, immunodeficiencies, graft versus host disease, AIDS, bronchial asthma, Crohn's disease; multiple sclerosis, treatment of Albright Hereditary Ostoeodystrophy, infectious disease, anorexia, cancer-associated cachexia, cancer, neurodegenerative disorders, Alzheimer's Disease, Parkinson's Disorder, immune disorders, hematopoietic disorders, and the various dyslipidemias, the metabolic syndrome X and wasting disorders associated with chronic diseases and various cancers, as well as conditions such as transplantation and fertility.

[0037] NOVX nucleic acids and their encoded polypeptides are useful in a variety of applications and contexts. The various NOVX nucleic acids and polypeptides according to the invention are useful as novel members of the protein families according to the presence of domains and sequence relatedness to previously described proteins. Additionally, NOVX nucleic acids and polypeptides can also be used to identify proteins that are members of the family to which the NOVX polypeptides belong.

[0038] Consistent with other known members of the family of proteins, identified in column 5 of Table A, the NOVX polypeptides of the present invention show homology to, and contain domains that are characteristic of, other members of such protein families. Details of the sequence relatedness and domain analysis for each NOVX are presented in Example A.

[0039] The NOVX nucleic acids and polypeptides can also be used to screen for molecules, which inhibit or enhance NOVX activity or function. Specifically, the nucleic acids and polypeptides according to the invention may be used as targets for the identification of small molecules that modulate or inhibit diseases associated with the protein families listed in Table A.

[0040] The NOVX nucleic acids and polypeptides are also useful for detecting specific cell types. Details of the expression analysis for each NOVX are presented in Example C. Accordingly, the NOVX nucleic acids, polypeptides, antibodies and related compounds according to the invention will have diagnostic and therapeutic applications in the detection of a variety of diseases with differential expression in normal vs. diseased tissues, e.g., detection of a variety of cancers.

[0041] Additional utilities for NOVX nucleic acids and polypeptides according to the invention are disclosed herein.

### NOVX clones

[0042] NOVX nucleic acids and their encoded polypeptides are useful in a variety of applications and contexts. The various NOVX nucleic acids and polypeptides according to the invention are useful as novel members of the protein families according to the presence of domains and sequence relatedness to previously described proteins. Additionally, NOVX nucleic acids and polypeptides can also be used to identify proteins that are members of the family to which the NOVX polypeptides belong.

[0043] The NOVX genes and their corresponding encoded proteins are useful for preventing, treating or ameliorating medical conditions, e.g., by protein or gene therapy. Pathological conditions can be diagnosed by determining the amount of the new protein in a sample or by determining the presence of mutations in the new genes. Specific uses are described for each of the NOVX genes, based on the tissues in which they are most highly expressed. Uses include developing products for the diagnosis or treatment of a variety of diseases and disorders.

[0044] The NOVX nucleic acids and proteins of the invention are useful in potential diagnostic and therapeutic applications and as a research tool. These include serving as a specific or selective nucleic acid or protein diagnostic and/or prognostic marker, wherein the presence or amount of the nucleic acid or the protein are to be assessed, as well as potential therapeutic applications such as the following: (i) a protein therapeutic, (ii) a small molecule drug target, (iii) an antibody target (therapeutic, diagnostic, drug targeting/cytotoxic antibody), (iv) a nucleic acid useful in gene therapy (gene delivery/gene ablation), and (v) a composition promoting tissue regeneration in vitro and in vivo (vi) a biological defense weapon.

[0045] In one specific embodiment, the invention includes an isolated polypeptide comprising an amino acid sequence selected from the group consisting of: (a) a mature form of the amino acid sequence selected from the group consisting of SEQ ID NO:2n, wherein n is an integer between 1 and 102, (b) a variant of a mature form of the amino acid sequence selected from the group consisting of SEQ ID NO:2n, wherein n is an integer between 1 and 102, wherein any amino acid in the mature form is changed to a different amino acid, provided that no more than 15% of the amino acid residues in the sequence of the mature form are so changed; (c) an amino acid sequence selected from the group consisting of SEQ ID NO:2n, wherein n is an integer between 1 and 102, (d) a variant of the amino acid sequence selected from the group consisting of SEQ ID NO:2n, wherein n is an integer between 1 and 102, wherein any amino acid specified in the chosen sequence is changed to a different amino acid, provided that no more than 15% of the amino acid residues in the sequence are so changed; and (e) a fragment of any of (a) through (d).

[0046] In another specific embodiment, the invention includes an isolated nucleic acid molecule comprising a nucleic acid sequence encoding a polypeptide comprising an amino acid sequence selected from the group consisting of: (a) a mature form of the amino acid sequence given SEQ ID NO:2n, wherein n is an integer between 1 and 102; (b) a variant of a mature form of the amino acid sequence selected from the group consisting of SEQ ID NO:2n, wherein n is an integer between 1 and 102, wherein any amino acid in the mature form of the chosen sequence is changed to a different amino acid, provided that no more than 15% of the amino acid residues in the sequence of the mature form are so changed; (c) the amino acid sequence selected from the group consisting of SEQ ID NO:2n, wherein n is an integer between 1 and 102; (d) a variant of the amino acid sequence selected from the group consisting of SEQ ID NO:2n, wherein n is an integer between 1 and 102, in which any amino acid specified in the chosen sequence is changed to a different amino acid, provided that no more than 15% of the amino acid residues in the sequence are so changed; (e) a nucleic acid fragment encoding at least a portion of a polypeptide comprising the amino acid sequence selected from the group consisting of SEQ ID NO:2n, wherein n is an integer between 1 and 102, or any variant of said polypeptide wherein any amino acid of the chosen sequence is changed to a different amino acid, provided that no more than 10% of the amino acid residues in the sequence are so changed; and (f) the complement of any of said nucleic acid molecules.

[0047] In yet another specific embodiment, the invention includes an isolated nucleic acid molecule, wherein said nucleic acid molecule comprises a nucleotide sequence selected from the group consisting of: (a) the nucleotide sequence selected from the group consisting of SEQ ID NO:2n−1, wherein n is an integer between 1 and 102; (b) a nucleotide sequence wherein one or more nucleotides in the nucleotide sequence selected from the group consisting of SEQ ID NO:2n−1, wherein n is an integer between 1 and 102, is changed from that selected from the group consisting of the chosen sequence to a different nucleotide provided that no more than 15% of the nucleotides are so changed; (c) a nucleic acid fragment of the sequence selected from the group consisting of SEQ ID NO:2n−1, wherein n is an integer between 1 and 102; and (d) a nucleic acid fragment wherein one or more nucleotides in the nucleotide sequence selected from the group consisting of SEQ ID NO:2n−1, wherein n is an integer between 1 and 102, is changed from that selected from the group consisting of the chosen sequence to a different nucleotide provided that no more than 15% of the nucleotides are so changed.

### NOVX Nucleic Acids and Polypeptides

[0048] One aspect of the invention pertains to isolated nucleic acid molecules that encode NOVX polypeptides or biologically active portions thereof. Also included in the invention are nucleic acid fragments sufficient for use as hybridization probes to identify NOVX-encoding nucleic acids (e.g., NOVX mRNAs) and fragments for use as PCR primers for the amplification and/or mutation of NOVX nucleic acid molecules. As used herein, the term “nucleic acid molecule” is intended to include DNA molecules (e.g., cDNA or genomic DNA), RNA molecules (e.g., mRNA), analogs of the DNA or RNA generated using nucleotide analogs, and derivatives, fragments and homologs thereof. The nucleic acid molecule may be single-stranded or double-stranded, but preferably is comprised double-stranded DNA.

[0049] A NOVX nucleic acid can encode a mature NOVX polypeptide. As used herein, a “mature” form of a polypeptide or protein disclosed in the present invention is the product of a naturally occurring polypeptide, precursor form, or proprotein. The naturally occurring polypeptide, precursor or proprotein includes, by way of nonlimiting example, the full-length gene product encoded by the corresponding gene. Alternatively, it may be defined as the polypeptide, precursor or proprotein encoded by an ORF described herein. The product “mature” form arises, by way of nonlimiting example, as a result of one or more naturally occurring processing steps that may take place within the cell (e.g., host cell) in which the gene product arises. Examples of such processing steps leading to a “mature” form of a polypeptide or protein include the cleavage of the N-terminal methionine residue encoded by the initiation codon of an ORF or the proteolytic cleavage of a signal peptide or leader sequence. Thus a mature form arising from a precursor polypeptide or protein that has residues 1 to N, where residue 1 is the N-terminal methionine, would have residues 2 through N remaining after removal of the N-terminal methionine. Alternatively, a mature form arising from a precursor polypeptide or protein having residues 1 to N, in which an N-terminal signal sequence from residue 1 to residue M is cleaved, would have the residues from residue M+1 to residue N remaining. Further as used herein, a “mature” form of a polypeptide or protein may arise from a post-translational modification step other than a proteolytic cleavage event. Such additional processes include, by way of non-limiting example, glycosylation, myristylation or phosphorylation. In general, a mature polypeptide or protein may result from the operation of only one of these processes, or a combination of any of them.

[0050] The term “probe”, as utilized herein, refers to nucleic acid sequences of variable length, preferably between at least about 10 nucleotides (nt), about 100 nt, or as many as approximately, e.g., 6,000 nt, depending upon the specific use. Probes are used in the detection of identical, similar, or complementary nucleic acid sequences. Longer length probes are generally obtained from a natural or recombinant source, are highly specific, and much slower to hybridize than shorter-length oligomer probes. Probes may be single-or double-stranded and designed to have specificity in PCR, membrane-based hybridization technologies, or ELISA-like technologies.

[0051] The term “isolated” nucleic acid molecule, as used herein, is a nucleic acid that is separated from other nucleic acid molecules which are present in the natural source of the nucleic acid. Preferably, an “isolated” nucleic acid is free of sequences which naturally flank the nucleic acid (i.e., sequences located at the 5′- and 3′-termini of the nucleic acid) in the genomic DNA of the organism from which the nucleic acid is derived. For example, in various embodiments, the isolated NOVX nucleic acid molecules can contain less than about 5 kb, about 4 kb, about 3 kb, about 2 kb, about 1 kb, about 0.5 kb, or about 0.1 kb, of nucleotide sequences which naturally flank the nucleic acid molecule in genomic DNA of the cell/tissue from which the nucleic acid is derived (e.g., brain, heart, liver, spleen, etc.). Moreover, an “isolated” nucleic acid molecule, such as a cDNA molecule, can be substantially free of other cellular material, or culture medium, or of chemical precursors or other chemicals.

[0052] A nucleic acid molecule of the invention, e.g., a nucleic acid molecule having the nucleotide sequence of SEQ ID NOS: 2n−1, wherein n is an integer between 1 and 102, or a complement of this nucleotide sequence, can be isolated using standard molecular biology techniques and the sequence information provided herein. Using all or a portion of the nucleic acid sequence of SEQ ID NOS:2n−1, wherein n is an integer between 1 and 102, as a hybridization probe, NOVX molecules can be isolated using standard hybridization and cloning techniques (e.g., as described in Sambrook, et al., (eds.), MOLECULAR CLONING: A LABORATORY MANUAL 2^{nd} Ed., Cold Spring Harbor Laboratory Press, Cold Spring Harbor, N.Y., 1989; and Ausubel, et al., (eds.), CURRENT PROTOCOLS IN MOLECULAR BIOLOGY, John Wiley & Sons, New York, N.Y., 1993).

[0053] A nucleic acid of the invention can be amplified using cDNA, mRNA or, alternatively, genomic DNA as a template with appropriate oligonucleotide primers according to standard PCR amplification techniques. The nucleic acid so amplified can be cloned into an appropriate vector and characterized by DNA sequence analysis. Furthermore, oligonucleotides corresponding to NOVX nucleotide sequences can be prepared by standard synthetic techniques, e.g., using an automated DNA synthesizer.

[0054] As used herein, the term “oligonucleotide” refers to a series of linked nucleotide residues. A short oligonucleotide sequence may be based on, or designed from, a genomic or cDNA sequence and is used to amplify, confirm, or reveal the presence of an identical, similar or complementary DNA or RNA in a particular cell or tissue. Oligonucleotides comprise a nucleic acid sequence having about 10 nt, 50 nt, or 100 nt in length, preferably about 15 nt to 30 nt in length. In one embodiment of the invention, an oligonucleotide comprising a nucleic acid molecule less than 100 nt in length would further comprise at least 6 contiguous nucleotides of SEQ ID NOS:2n−1, wherein n is an integer between 1 and 102, or a complement thereof. Oligonucleotides may be chemically synthesized and may also be used as probes.

[0055] In another embodiment, an isolated nucleic acid molecule of the invention comprises a nucleic acid molecule that is a complement of the nucleotide sequence shown in SEQ ID NOS:2n−1, wherein n is an integer between 1 and 102, or a portion of this nucleotide sequence (e.g., a fragment that can be used as a probe or primer or a fragment encoding a biologically-active portion of a NOVX polypeptide). A nucleic acid molecule that is complementary to the nucleotide sequence of SEQ ID NOS:2n−1, wherein n is an integer between 1 and 102, is one that is sufficiently complementary to the nucleotide sequence of SEQ ID NOS:2n−1, wherein n is an integer between 1 and 102, that it can hydrogen bond with few or no mismatches to a nucleotide sequence of SEQ ID NOS:2n−1, wherein n is an integer between 1 and 102, thereby forming a stable duplex.

[0056] As used herein, the term “complementary” refers to Watson-Crick or Hoogsteen base pairing between nucleotides units of a nucleic acid molecule, and the term “binding” means the physical or chemical interaction between two polypeptides or compounds or associated polypeptides or compounds or combinations thereof. Binding includes ionic, non-ionic, van der Waals, hydrophobic interactions, and the like. A physical interaction can be either direct or indirect. Indirect interactions may be through or due to the effects of another polypeptide or compound. Direct binding refers to interactions that do not take place through, or due to, the effect of another polypeptide or compound, but instead are without other substantial chemical intermediates.

[0057] A “fragment” provided herein is defined as a sequence of at least 6 (contiguous) nucleic acids or at least 4 (contiguous) amino acids, a length sufficient to allow for specific hybridization in the case of nucleic acids or for specific recognition of an epitope in the case of amino acids, and is at most some portion less than a full length sequence. Fragments may be derived from any contiguous portion of a nucleic acid or amino acid sequence of choice.

[0058] A full-length NOVX clone is identified as containing an ATG translation start codon and an in-frame stop codon. Any disclosed NOVX nucleotide sequence lacking an ATG start codon therefore encodes a truncated C-terminal fragment of the respective NOVX polypeptide, and requires that the corresponding full-length cDNA extend in the 5′ direction of the disclosed sequence. Any disclosed NOVX nucleotide sequence lacking an in-frame stop codon similarly encodes a truncated N-terminal fragment of the respective NOVX polypeptide, and requires that the corresponding full-length cDNA extend in the 3′ direction of the disclosed sequence.

[0059] A “derivative” is a nucleic acid sequence or amino acid sequence formed from the native compounds either directly, by modification or partial substitution. An “analog” is a nucleic acid sequence or amino acid sequence that has a structure similar to, but not identical to, the native compound, e.g. they differs from it in respect to certain components or side chains. Analogs may be synthetic or derived from a different evolutionary origin and may have a similar or opposite metabolic activity compared to wild type. A “homolog” is a nucleic acid sequence or amino acid sequence of a particular gene that is derived from different species.

[0060] Derivatives and analogs may be full length or other than full length. Derivatives or analogs of the nucleic acids or proteins of the invention include, but are not limited to, molecules comprising regions that are substantially homologous to the nucleic acids or proteins of the invention, in various embodiments, by at least about 70%, 80%, or 95% identity (with a preferred identity of 80-95%) over a nucleic acid or amino acid sequence of identical size or when compared to an aligned sequence in which the alignment is done by a computer homology program known in the art, or whose encoding nucleic acid is capable of hybridizing to the complement of a sequence encoding the proteins under stringent, moderately stringent, or low stringent conditions. See e.g. Ausubel, et al., CURRENT PROTOCOLS IN MOLECULAR BIOLOGY, John Wiley & Sons, New York, N.Y., 1993, and below.

[0061] A “homologous nucleic acid sequence” or “homologous amino acid sequence,” or variations thereof, refer to sequences characterized by a homology at the nucleotide level or amino acid level as discussed above. Homologous nucleotide sequences include those sequences coding for isoforms of NOVX polypeptides. Isoforms can be expressed in different tissues of the same organism as a result of, for example, alternative splicing of RNA. Alternatively, isoforms can be encoded by different genes. In the invention, homologous nucleotide sequences include nucleotide sequences encoding for a NOVX polypeptide of species other than humans, including, but not limited to: vertebrates, and thus can include, e.g., frog, mouse, rat, rabbit, dog, cat cow, horse, and other organisms. Homologous nucleotide sequences also include, but are not limited to, naturally occurring allelic variations and mutations of the nucleotide sequences set forth herein. A homologous nucleotide sequence does not, however, include the exact nucleotide sequence encoding human NOVX protein. Homologous nucleic acid sequences include those nucleic acid sequences that encode conservative amino acid substitutions (see below) in SEQ ID NO:2n−1, wherein n is an integer between 1 and 102, as well as a polypeptide possessing NOVX biological activity. Various biological activities of the NOVX proteins are described below.

[0062] A NOVX polypeptide is encoded by the open reading frame (“ORF”) of a NOVX nucleic acid. An ORF corresponds to a nucleotide sequence that could potentially be translated into a polypeptide. A stretch of nucleic acids comprising an ORF is uninterrupted by a stop codon. An ORF that represents the coding sequence for a full protein begins with an ATG “start” codon and terminates with one of the three “stop” codons, namely, TAA, TAG, or TGA. For the purposes of this invention, an ORF may be any part of a coding sequence, with or without a start codon, a stop codon, or both. For an ORF to be considered as a good candidate for coding for a bonafide cellular protein, a minimum size requirement is often set, e.g., a stretch of DNA that would encode a protein of 50 amino acids or more.

[0063] The nucleotide sequences determined from the cloning of the human NOVX genes allows for the generation of probes and primers designed for use in identifying and/or cloning NOVX homologues in other cell types, e.g. from other tissues, as well as NOVX homologues from other vertebrates. The probe/primer typically comprises substantially purified oligonucleotide. The oligonucleotide typically comprises a region of nucleotide sequence that hybridizes under stringent conditions to at least about 12, 25, 50, 100, 150, 200, 250, 300, 350 or 400 consecutive sense strand nucleotide sequence of SEQ ID NO:2n−1, wherein n is an integer between 1 and 102; or an anti-sense strand nucleotide sequence of SEQ ID NO:2n−1, wherein n is an integer between 1 and 102; or of a naturally occurring mutant of SEQ ID NO:2n−1, wherein n is an integer between 1 and 102.

[0064] Probes based on the human NOVX nucleotide sequences can be used to detect transcripts or genomic sequences encoding the same or homologous proteins. In various embodiments, the probe has a detectable label attached, e.g. the label can be a radioisotope, a fluorescent compound, an enzyme, or an enzyme co-factor. Such probes can be used as a part of a diagnostic test kit for identifying cells or tissues which mis-express a NOVX protein, such as by measuring a level of a NOVX-encoding nucleic acid in a sample of cells from a subject e.g., detecting NOVX mRNA levels or determining whether a genomic NOVX gene has been mutated or deleted. “A polypeptide having a biologically-active portion of a NOVX polypeptide” refers to polypeptides exhibiting activity similar, but not necessarily identical to, an activity of a polypeptide of the invention, including mature forms, as measured in a particular biological assay, with or without dose dependency. A nucleic acid fragment encoding a “biologically-active portion of NOVX” can be prepared by isolating a portion of SEQ ID NO:2n−1, wherein n is an integer between 1 and 102, that encodes a polypeptide having a NOVX biological activity (the biological activities of the NOVX proteins are described below), expressing the encoded portion of NOVX protein (e.g., by recombinant expression in vitro) and assessing the activity of the encoded portion of NOVX.

### NOVX Nucleic Acid and Polypeptide Variants

[0065] The invention further encompasses nucleic acid molecules that differ from the nucleotide sequences of SEQ ID NO:2n−1, wherein n is an integer between 1 and 102, due to degeneracy of the genetic code and thus encode the same NOVX proteins as that encoded by the nucleotide sequences of SEQ ID NO:2n−1, wherein n is an integer between 1 and 102. In another embodiment, an isolated nucleic acid molecule of the invention has a nucleotide sequence encoding a protein having an amino acid sequence of SEQ ID NO:2n, wherein n is an integer between 1 and 102.

[0066] In addition to the human NOVX nucleotide sequences of SEQ ID NO:2n−1, wherein n is an integer between 1 and 102, it will be appreciated by those skilled in the art that DNA sequence polymorphisms that lead to changes in the amino acid sequences of the NOVX polypeptides may exist within a population (e.g., the human population). Such genetic polymorphism in the NOVX genes may exist among individuals within a population due to natural allelic variation. As used herein, the terms “gene” and “recombinant gene” refer to nucleic acid molecules comprising an open reading frame (ORF) encoding a NOVX protein, preferably a vertebrate NOVX protein. Such natural allelic variations can typically result in 1-5% variance in the nucleotide sequence of the NOVX genes. Any and all such nucleotide variations and resulting amino acid polymorphisms in the NOVX polypeptides, which are the result of natural allelic variation and that do not alter the functional activity of the NOVX polypeptides, are intended to be within the scope of the invention.

[0067] Moreover, nucleic acid molecules encoding NOVX proteins from other species, and thus that have a nucleotide sequence that differs from a human SEQ ID NO:2n−1, wherein n is an integer between 1 and 102, are intended to be within the scope of the invention. Nucleic acid molecules corresponding to natural allelic variants and homologues of the NOVX cDNAs of the invention can be isolated based on their homology to the human NOVX nucleic acids disclosed herein using the human cDNAs, or a portion thereof, as a hybridization probe according to standard hybridization techniques under stringent hybridization conditions.

[0068] Accordingly, in another embodiment, an isolated nucleic acid molecule of the invention is at least 6 nucleotides in length and hybridizes under stringent conditions to the nucleic acid molecule comprising the nucleotide sequence of SEQ ID NO:2n−1, wherein n is an integer between 1 and 102. In another embodiment, the nucleic acid is at least 10, 25, 50, 100, 250, 500, 750, 1000, 1500, or 2000 or more nucleotides in length. In yet another embodiment, an isolated nucleic acid molecule of the invention hybridizes to the coding region. As used herein, the term “hybridizes under stringent conditions” is intended to describe conditions for hybridization and washing under which nucleotide sequences at least about 65% homologous to each other typically remain hybridized to each other.

[0069] Homologs (i.e., nucleic acids encoding NOVX proteins derived from species other than human) or other related sequences (e.g., paralogs) can be obtained by low, moderate or high stringency hybridization with all or a portion of the particular human sequence as a probe using methods well known in the art for nucleic acid hybridization and cloning.

[0070] As used herein, the phrase “stringent hybridization conditions” refers to conditions under which a probe, primer or oligonucleotide will hybridize to its target sequence, but to no other sequences. Stringent conditions are sequence-dependent and will be different in different circumstances. Longer sequences hybridize specifically at higher temperatures than shorter sequences. Generally, stringent conditions are selected to be about 5° C. lower than the thermal melting point (Tm) for the specific sequence at a defined ionic strength and pH. The Tm is the temperature (under defined ionic strength, pH and nucleic acid concentration) at which 50% of the probes complementary to the target sequence hybridize to the target sequence at equilibrium. Since the target sequences are generally present at excess, at Tm, 50% of the probes are occupied at equilibrium. Typically, stringent conditions will be those in which the salt concentration is less than about 1.0 M sodium ion, typically about 0.01 to 1.0 M sodium ion (or other salts) at pH 7.0 to 8.3 and the temperature is at least about 30° C. for short probes, primers or oligonucleotides (e.g., 10 nt to 50 nt) and at least about 60° C. for longer probes, primers and oligonucleotides. Stringent conditions may also be achieved with the addition of destabilizing agents, such as formamide.

[0071] Stringent conditions are known to those skilled in the art and can be found in Ausubel, et al., (eds.), CURRENT PROTOCOLS IN MOLECULAR BIOLOGY, John Wiley & Sons, N.Y. (1989), 6.3.1-6.3.6. Preferably, the conditions are such that sequences at least about 65%, 70%, 75%, 85%, 90%, 95%, 98%, or 99% homologous to each other typically remain hybridized to each other. A non-limiting example of stringent hybridization conditions are hybridization in a high salt buffer comprising 6×SSC, 50 mM Tris-HCl (pH 7.5), 1 mM EDTA, 0.02% PVP, 0.02% Ficoll, 0.02% BSA, and 500 mg/ml denatured salmon sperm DNA at 65° C., followed by one or more washes in 0.2×SSC, 0.01% BSA at 50° C. An isolated nucleic acid molecule of the invention that hybridizes under stringent conditions to a sequence of SEQ ID NO:2n−1, wherein n is an integer between 1 and 102, corresponds to a naturally-occurring nucleic acid molecule. As used herein, a “naturally-occurring” nucleic acid molecule refers to an RNA or DNA molecule having a nucleotide sequence that occurs in nature (e.g., encodes a natural protein).

[0072] In a second embodiment, a nucleic acid sequence that is hybridizable to the nucleic acid molecule comprising the nucleotide sequence of SEQ ID NO:2n−1, wherein n is an integer between 1 and 102, or fragments, analogs or derivatives thereof, under conditions of moderate stringency is provided. A non-limiting example of moderate stringency hybridization conditions are hybridization in 6×SSC, 5×Reinhardt's solution, 0.5% SDS and 100 mg/ml denatured salmon sperm DNA at 55° C., followed by one or more washes in 1×SSC, 0.1% SDS at 37° C. Other conditions of moderate stringency that may be used are well-known within the art. See, e.g., Ausubel, et al. (eds.), 1993, CURRENT PROTOCOLS IN MOLECULAR BIOLOGY, John Wiley & Sons, NY, and Krieger, 1990; GENE TRANSFER AND EXPRESSION, A LABORATORY MANUAL, Stockton Press, NY.

[0073] In a third embodiment, a nucleic acid that is hybridizable to the nucleic acid molecule comprising the nucleotide sequences of SEQ ID NO:2n−1, wherein n is an integer between 1 and 102, or fragments, analogs or derivatives thereof, under conditions of low stringency, is provided. A non-limiting example of low stringency hybridization conditions are hybridization in 35% formamide, 5×SSC, 50 mM Tris-HCl (pH 7.5), 5 mM EDTA, 0.02% PVP, 0.02% Ficoll, 0.2% BSA, 100 mg/ml denatured salmon sperm DNA, 10% (wt/vol) dextran sulfate at 40° C., followed by one or more washes in 2×SSC, 25 mM Tris-HCl (pH 7.4), 5 mM EDTA, and 0.1% SDS at 50° C. Other conditions of low stringency that may be used are well known in the art (e.g., as employed for cross-species hybridizations). See, e.g., Ausubel, et al. (eds.), 1993, CURRENT PROTOCOLS IN MOLECULAR BIOLOGY, John Wiley & Sons, NY, and Kriegler, 1990, GENE TRANSFER AND EXPRESSION, A LABORATORY MANUAL, Stockton Press, NY; Shilo and Weinberg, 1981. Proc Natl Acad Sci USA 78: 6789-6792.

### Conservative Mutations

[0074] In addition to naturally-occurring allelic variants of NOVX sequences that may exist in the population, the skilled artisan will further appreciate that changes can be introduced by mutation into the nucleotide sequences of SEQ ID NO:2n−1, wherein n is an integer between 1 and 102, thereby leading to changes in the amino acid sequences of the encoded NOVX protein, without altering the functional ability of that NOVX protein. For example, nucleotide substitutions leading to amino acid substitutions at “inon-essential” amino acid residues can be made in the sequence of SEQ ID NO:2n, wherein n is an integer between 1 and 102. A “non-essential” amino acid residue is a residue that can be altered from the wild-type sequences of the NOVX proteins without altering their biological activity, whereas an “essential” amino acid residue is required for such biological activity. For example, amino acid residues that are conserved among the NOVX proteins of the invention are predicted to be particularly non-amenable to alteration. Amino acids for which conservative substitutions can be made are well-known within the art.

[0075] Another aspect of the invention pertains to nucleic acid molecules encoding NOVX proteins that contain changes in amino acid residues that are not essential for activity. Such NOVX proteins differ in amino acid sequence from SEQ ID NO:2n−1, wherein n is an integer between 1 and 102, yet retain biological activity. In one embodiment, the isolated nucleic acid molecule comprises a nucleotide sequence encoding a protein, wherein the protein comprises an amino acid sequence at least about 40% homologous to the amino acid sequences of SEQ ID NO:2n, wherein n is an integer between 1 and 102. Preferably, the protein encoded by the nucleic acid molecule is at least about 60% homologous to SEQ ID NO:2n, wherein n is an integer between 1 and 102; more preferably at least about 70% homologous to SEQ ID NO:2n, wherein n is an integer between 1 and 102; still more preferably at least about 80% homologous to SEQ ID NO:2n, wherein n is an integer between 1 and 102; even more preferably at least about 90% homologous to SEQ ID NO:2n, wherein n is an integer between 1 and 102; and most preferably at least about 95% homologous to SEQ ID NO:2n, wherein n is an integer between 1 and 102.

[0076] An isolated nucleic acid molecule encoding a NOVX protein homologous to the protein of SEQ ID NO:2n, wherein n is an integer between 1 and 102, can be created by introducing one or more nucleotide substitutions, additions or deletions into the nucleotide sequence of SEQ ID NO:2n−1, wherein n is an integer between 1 and 102, such that one or more amino acid substitutions, additions or deletions are introduced into the encoded protein.

[0077] Mutations can be introduced any one of SEQ ID NO:2n−1, wherein n is an integer between 1 and 102, by standard techniques, such as site-directed mutagenesis and PCR-mediated mutagenesis. Preferably, conservative amino acid substitutions are made at one or more predicted, non-essential amino acid residues. A “conservative amino acid substitution” is one in which the amino acid residue is replaced with an amino acid residue having a similar side chain. Families of amino acid residues having similar side chains have been defined within the art. These families include amino acids with basic side chains (e.g., lysine, arginine, histidine), acidic side chains (e.g., aspartic acid, glutamic acid), uncharged polar side chains (e.g., glycine, asparagine, glutamine, serine, threonine, tyrosine, cysteine), nonpolar side chains (e.g., alanine, valine, leucine, isoleucine, proline, phenylalanine, methionine, tryptophan), beta-branched side chains (e.g., threonine, valine, isoleucine) and aromatic side chains (e.g., tyrosine, phenylalanine, tryptophan, histidine). Thus, a predicted non-essential amino acid residue in the NOVX protein is replaced with another amino acid residue from the same side chain family. Alternatively, in another embodiment, mutations can be introduced randomly along all or part of a NOVX coding sequence, such as by saturation mutagenesis, and the resultant mutants can be screened for NOVX biological activity to identify mutants that retain activity. Following mutagenesis of a nucleic acid of SEQ ID NO:2n−1, wherein n is an integer between 1 and 102, the encoded protein can be expressed by any recombinant technology known in the art and the activity of the protein can be determined.

[0078] The relatedness of amino acid families may also be determined based on side chain interactions. Substituted amino acids may be fully conserved “strong” residues or fully conserved “weak” residues. The “strong” group of conserved amino acid residues may be any one of the following groups: STA, NEQK, NHQK, NDEQ, QHRK, MILV, MILF, HY, FYW, wherein the single letter amino acid codes are grouped by those amino acids that may be substituted for each other. Likewise, the “weak” group of conserved residues may be any one of the following: CSA, ATV, SAG, STNK, STPA, SGND, SNDEQK, NDEQHK, NEQHRK, HFY, wherein the letters within each group represent the single letter amino acid code.

[0079] In one embodiment, a mutant NOVX protein can be assayed for (i) the ability to form protein:protein interactions with other NOVX proteins, other cell-surface proteins, or biologically-active portions thereof, (ii) complex formation between a mutant NOVX protein and a NOVX ligand; or (iii) the ability of a mutant NOVX protein to bind to an intracellular target protein or biologically-active portion thereof; (e.g. avidin proteins).

[0080] In yet another embodiment, a mutant NOVX protein can be assayed for the ability to regulate a specific biological function (e.g., regulation of insulin release).

### Interfering RNA

[0081] In one aspect of the invention, NOVX gene expression can be attenuated by RNA interference. One approach well-known in the art is short interfering RNA (siRNA) mediated gene silencing where expression products of a NOVX gene are targeted by specific double stranded NOVX derived siRNA nucleotide sequences that are complementary to at least a 19-25 nt long segment of the NOVX gene transcript, including the 5′ untranslated (UT) region, the ORF, or the 3′ UT region. See, e.g., PCT applications WO00/44895, WO99/32619, WO01n75164, WO01/92513, WO01/29058, WO01/89304, WO02/16620, and WO02/29858, each incorporated by reference herein in their entirety. Targeted genes can be a NOVX gene, or an upstream or downstream modulator of the NOVX gene. Nonlimiting examples of upstream or downstream modulators of a NOVX gene include, e.g., a transcription factor that binds the NOVX gene promoter, a kinase or phosphatase that interacts with a NOVX polypeptide, and polypeptides involved in a NOVX regulatory pathway.

[0082] According to the methods of the present invention, NOVX gene expression is silenced using short interfering RNA. A NOVX polynucleotide according to the invention includes a siRNA polynucleotide. Such a NOVX siRNA can be obtained using a NOVX polynucleotide sequence, for example, by processing the NOVX ribopolynucleotide sequence in a cell-free system, such as but not limited to a Drosophila extract, or by transcription of recombinant double stranded NOVX RNA or by chemical synthesis of nucleotide sequences homologous to a NOVX sequence. See, e.g., Tuschl, Zamore, Lehmann, Bartel and Sharp (1999), Genes & Dev. 13: 3191-3197, incorporated herein by reference in its entirety. When synthesized, a typical 0.2 micromolar-scale RNA synthesis provides about 1 milligram of siRNA, which is sufficient for 1000 transfection experiments using a 24-well tissue culture plate format.

[0083] The most efficient silencing is generally observed with siRNA duplexes composed of a 21-nt sense strand and a 21-nt antisense strand, paired in a manner to have a 2-nt 3′ overhang. The sequence of the 2-nt 3′ overhang makes an additional small contribution to the specificity of siRNA target recognition. The contribution to specificity is localized to the unpaired nucleotide adjacent to the first paired bases. In one embodiment, the nucleotides in the 3′ overhang are ribonucleotides. In an alternative embodiment, the nucleotides in the 3′ overhang are deoxyribonucleotides. Using 2′-deoxyribonucleotides in the 3′ overhangs is as efficient as using ribonucleotides, but deoxyribonucleotides are often cheaper to synthesize and are most likely more nuclease resistant.

[0084] A contemplated recombinant expression vector of the invention comprises a NOVX DNA molecule cloned into an expression vector comprising operatively-linked regulatory sequences flanking the NOVX sequence in a manner that allows for expression (by transcription of the DNA molecule) of both strands. An RNA molecule that is antisense to NOVX mRNA is transcribed by a first promoter (e.g., a promoter sequence 3′ of the cloned DNA) and an RNA molecule that is the sense strand for the NOVX mRNA is transcribed by a second promoter (e.g., a promoter sequence 5′ of the cloned DNA). The sense and antisense strands may hybridize in vivo to generate siRNA constructs for silencing of the NOVX gene. Alternatively, two constructs can be utilized to create the sense and anti-sense strands of a siRNA construct. Finally, cloned DNA can encode a construct having secondary structure, wherein a single transcript has both the sense and complementary antisense sequences from the target gene or genes. In an example of this embodiment, a hairpin RNAi product is homologous to all or a portion of the target gene. In another example, a hairpin RNAi product is a siRNA. The regulatory sequences flanking the NOVX sequence may be identical or may be different, such that their expression may be modulated independently, or in a temporal or spatial manner.

[0085] In a specific embodiment, siRNAs are transcribed intracellularly by cloning the NOVX gene templates into a vector containing, e.g., a RNA pol III transcription unit from the smaller nuclear RNA (snRNA) U6 or the human RNase P RNA H1. One example of a vector system is the GeneSuppressor™ RNA Interference kit (commercially available from Imgenex). The U6 and H1 promoters are members of the type III class of Pol III promoters. The +1 nucleotide of the U6-like promoters is always guanosine, whereas the +1 for H1 promoters is adenosine. The termination signal for these promoters is defined by five consecutive thymidines. The transcript is typically cleaved after the second uridine. Cleavage at this position generates a 3′ UU overhang in the expressed siRNA, which is similar to the 3′ overhangs of synthetic siRNAs. Any sequence less than 400 nucleotides in length can be transcribed by these promoter, therefore they are ideally suited for the expression of around 21-nucleotide siRNAs in, e.g., an approximately 50-nucleotide RNA stem-loop transcript.

[0086] A siRNA vector appears to have an advantage over synthetic siRNAs where long term knock-down of expression is desired. Cells transfected with a siRNA expression vector would experience steady, long-term mRNA inhibition. In contrast, cells transfected with exogenous synthetic siRNAs typically recover from mRNA suppression within seven days or ten rounds of cell division. The long-term gene silencing ability of siRNA expression vectors may provide for applications in gene therapy.

[0087] In general, siRNAs are chopped from longer dsRNA by an ATP-dependent ribonuclease called DICER. DICER is a member of the RNase III family of double-stranded RNA-specific endonucleases. The siRNAs assemble with cellular proteins into an endonuclease complex. In vitro studies in Drosophila suggest that the siRNAs/protein complex (siRNP) is then transferred to a second enzyme complex, called an RNA-induced silencing complex (RISC), which contains an endoribonuclease that is distinct from DICER. RISC uses the sequence encoded by the antisense siRNA strand to find and destroy mRNAs of complementary sequence. The siRNA thus acts as a guide, restricting the ribonuclease to cleave only mRNAs complementary to one of the two siRNA strands.

[0088] A NOVX mRNA region to be targeted by siRNA is generally selected from a desired NOVX sequence beginning 50 to 100 nt downstream of the start codon. Alternatively, 5′ or 3′ UTRs and regions nearby the start codon can be used but are generally avoided, as these may be richer in regulatory protein binding sites. UTR-binding proteins and/or translation initiation complexes may interfere with binding of the siRNP or RISC endonuclease complex. An initial BLAST homology search for the selected siRNA sequence is done against an available nucleotide sequence library to ensure that only one gene is targeted. Specificity of target recognition by siRNA duplexes indicate that a single point mutation located in the paired region of an siRNA duplex is sufficient to abolish target mRNA degradation. See, Elbashir et al. 2001 EMBO J. 20(23):6877-88. Hence, consideration should be taken to accommodate SNPs, polymorphisms, allelic variants or species-specific variations when targeting a desired gene.

[0089] In one embodiment, a complete NOVX siRNA experiment includes the proper negative control. A negative control siRNA generally has the same nucleotide composition as the NOVX siRNA but lack significant sequence homology to the genome. Typically, one would scramble the nucleotide sequence of the NOVX siRNA and do a homology search to make sure it lacks homology to any other gene.

[0090] Two independent NOVX siRNA duplexes can be used to knock-down a target NOVX gene. This helps to control for specificity of the silencing effect. In addition, expression of two independent genes can be simultaneously knocked down by using equal concentrations of different NOVX siRNA duplexes, e.g., a NOVX siRNA and an siRNA for a regulator of a NOVX gene or polypeptide. Availability of siRNA-associating proteins is believed to be more limiting than target mRNA accessibility.

[0091] A targeted NOVX region is typically a sequence of two adenines (AA) and two thymidines (TT) divided by a spacer region of nineteen (N19) residues (e.g., AA(N19)TT). A desirable spacer region has a G/C-content of approximately 30% to 70%, and more preferably of about 50%. If the sequence AA(N19)TT is not present in the target sequence, an alternative target region would be AA(N21). The sequence of the NOVX sense siRNA corresponds to (N19)TT or N21, respectively. In the latter case, conversion of the 3′ end of the sense siRNA to TT can be performed if such a sequence does not naturally occur in the NOVX polynucleotide. The rationale for this sequence conversion is to generate a symmetric duplex with respect to the sequence composition of the sense and antisense 3′ overhangs. Symmetric 3′ overhangs may help to ensure that the siRNPs are formed with approximately equal ratios of sense and antisense target RNA-cleaving siRNPs. See, e.g., Elbashir, Lendeckel and Tuschl (2001). Genes & Dev. 15: 188-200, incorporated by reference herein in its entirely. The modification of the overhang of the sense sequence of the siRNA duplex is not expected to affect targeted mRNA recognition, as the antisense siRNA strand guides target recognition.

[0092] Alternatively, if the NOVX target mRNA does not contain a suitable AA(N21) sequence, one may search for the sequence NA(N21). Further, the sequence of the sense strand and antisense strand may still be synthesized as 5′ (N19)TT, as it is believed that the sequence of the 3′-most nucleotide of the antisense siRNA does not contribute to specificity. Unlike antisense or ribozyme technology, the secondary structure of the target mRNA does not appear to have a strong effect on silencing. See, Harborth, et al. (2001) J. Cell Science 114: 4557-4565, incorporated by reference in its entirety.

[0093] Transfection of NOVX siRNA duplexes can be achieved using standard nucleic acid transfection methods, for example, OLIGOFECTAMINE Reagent (commercially available from Invitrogen). An assay for NOVX gene silencing is generally performed approximately 2 days after transfection. No NOVX gene silencing has been observed in the absence of transfection reagent, allowing for a comparative analysis of the wild-type and silenced NOVX phenotypes. In a specific embodiment, for one well of a 24-well plate, approximately 0.84 μg of the siRNA duplex is generally sufficient. Cells are typically seeded the previous day, and are transfected at about 50% confluence. The choice of cell culture media and conditions are routine to those of skill in the art, and will vary with the choice of cell type. The efficiency of transfection may depend on the cell type, but also on the passage number and the confluency of the cells. The time and the manner of formation of siRNA-liposome complexes (e.g. inversion versus vortexing) are also critical. Low transfection efficiencies are the most frequent cause of unsuccessful NOVX silencing. The efficiency of transfection needs to be carefully examined for each new cell line to be used. Preferred cell are derived from a mammal, more preferably from a rodent such as a rat or mouse, and most preferably from a human. Where used for therapeutic treatment, the cells are preferentially autologous, although non-autologous cell sources are also contemplated as within the scope of the present invention.

[0094] For a control experiment, transfection of 0.84 μg single-stranded sense NOVX siRNA will have no effect on NOVX silencing, and 0.84 μg antisense siRNA has a weak silencing effect when compared to 0.84 μg of duplex siRNAs. Control experiments again allow for a comparative analysis of the wild-type and silenced NOVX phenotypes. To control for transfection efficiency, targeting of common proteins is typically performed, for example targeting of lamin A/C or transfection of a CMV-driven EGFP-expression plasmid (e.g. commercially available from Clontech). In the above example, a determination of the fraction of lamin A/C knockdown in cells is determined the next day by such techniques as immunofluorescence, Western blot, Northern blot or other similar assays for protein expression or gene expression. Lamin A/C monoclonal antibodies may be obtained from Santa Cruz Biotechnology.

[0095] Depending on the abundance and the half life (or turnover) of the targeted NOVX polynucleotide in a cell, a knock-down phenotype may become apparent after 1 to 3 days, or even later. In cases where no NOVX knock-down phenotype is observed, depletion of the NOVX polynucleotide may be observed by immunofluorescence or Western blotting. If the NOVX polynucleotide is still abundant after 3 days, cells need to be split and transferred to a fresh 24-well plate for re-transfection. If no knock-down of the targeted protein is observed, it may be desirable to analyze whether the target mRNA (NOVX or a NOVX upstream or downstream gene) was effectively destroyed by the transfected siRNA duplex. Two days after transfection, total RNA is prepared, reverse transcribed using a target-specific primer, and PCR-amplified with a primer pair covering at least one exon-exon junction in order to control for amplification of pre-mRNAs. RT/PCR of a non-targeted mRNA is also needed as control. Effective depletion of the mRNA yet undetectable reduction of target protein may indicate that a large reservoir of stable NOVX protein may exist in the cell. Multiple transfection in sufficiently long intervals may be necessary until the target protein is finally depleted to a point where a phenotype may become apparent. If multiple transfection steps are required, cells are split 2 to 3 days after transfection. The cells may be transfected immediately after splitting.

[0096] An inventive therapeutic method of the invention contemplates administering a NOVX siRNA construct as therapy to compensate for increased or aberrant NOVX expression or activity. The NOVX ribopolynucleotide is obtained and processed into siRNA fragments, or a NOVX siRNA is synthesized, as described above. The NOVX siRNA is administered to cells or tissues using known nucleic acid transfection techniques, as described above. A NOVX siRNA specific for a NOVX gene will decrease or knockdown NOVX transcription products, which will lead to reduced NOVX polypeptide production, resulting in reduced NOVX polypeptide activity in the cells or tissues.

[0097] The present invention also encompasses a method of treating a disease or condition associated with the presence of a NOVX protein in an individual comprising administering to the individual an RNAi construct that targets the mRNA of the protein (the mRNA that encodes the protein) for degradation. A specific RNAi construct includes a siRNA or a double stranded gene transcript that is processed into siRNAs. Upon treatment, the target protein is not produced or is not produced to the extent it would be in the absence of the treatment.

[0098] Where the NOVX gene function is not correlated with a known phenotype, a control sample of cells or tissues from healthy individuals provides a reference standard for determining NOVX expression levels. Expression levels are detected using the assays described, e.g., RT-PCR, Northern blotting, Western blotting, ELISA, and the like. A subject sample of cells or tissues is taken from a mammal, preferably a human subject, suffering from a disease state. The NOVX ribopolynucleotide is used to produce siRNA constructs, that are specific for the NOVX gene product. These cells or tissues are treated by administering NOVX siRNA's to the cells or tissues by methods described for the transfection of nucleic acids into a cell or tissue, and a change in NOVX polypeptide or polynucleotide expression is observed in the subject sample relative to the control sample, using the assays described. This NOVX gene knockdown approach provides a rapid method for determination of a NOVX minus (NOVX-) phenotype in the treated subject sample. The NOVX- phenotype observed in the treated subject sample thus serves as a marker for monitoring the course of a disease state during treatment.

[0099] In specific embodiments, a NOVX siRNA is used in therapy. Methods for the generation and use of a NOVX siRNA are known to those skilled in the art. Example techniques are provided below.

### Production of RNAs

[0100] Sense RNA (ssRNA) and antisense RNA (asRNA) of NOVX are produced using known methods such as transcription in RNA expression vectors. In the initial experiments, the sense and antisense RNA are about 500 bases in length each. The produced ssRNA and asRNA (0.5 μM) in 10 mM Tris-HCl (pH 7.5) with 20 mM NaCl were heated to 95° C. for 1 min then cooled and annealed at room temperature for 12 to 16 h. The RNAs are precipitated and resuspended in lysis buffer (below). To monitor annealing, RNAs are electrophoresed in a 2% agarose gel in TBE buffer and stained with ethidium bromide. See, e.g., Sambrook et al., Molecular Cloning. Cold Spring Harbor Laboratory Press, Plainview, N.Y. (1989).

### Lysate Preparation

[0101] Untreated rabbit reticulocyte lysate (Ambion) are assembled according to the manufacturer's directions. dsRNA is incubated in the lysate at 30° C. for 10 min prior to the addition of mRNAs. Then NOVX mRNAs are added and the incubation continued for an additional 60 min. The molar ratio of double stranded RNA and mRNA is about 200:1. The NOVX mRNA is radiolabeled (using known techniques) and its stability is monitored by gel electrophoresis.

[0102] In a parallel experiment made with the same conditions, the double stranded RNA is internally radiolabeled with a ³²P-ATP. Reactions are stopped by the addition of 2× proteinase K buffer and deproteinized as described previously (Tuschl et al., Genes Dev., 13:3191-3197 (1999)). Products are analyzed by electrophoresis in 15% or 18% polyacrylamide sequencing gels using appropriate RNA standards. By monitoring the gels for radioactivity, the natural production of 10 to 25 nt RNAs from the double stranded RNA can be determined.

[0103] The band of double stranded RNA, about 21-23 bps, is eluded. The efficacy of these 21-23 mers for suppressing NOVX transcription is assayed in vitro using the same rabbit reticulocyte assay described above using 50 nanomolar of double stranded 21-23 mer for each assay. The sequence of these 21-23 mers is then determined using standard nucleic acid sequencing techniques.

### RNA Preparation

[0104] 21 nt RNAs, based on the sequence determined above, are chemically synthesized using Expedite RNA phosphoramidites and thymidine phosphoramidite (Proligo, Germany). Synthetic oligonucleotides are deprotected and gel-purified (Elbashir, Lendeckel, & Tuschl, Genes & Dev. 15, 188-200 (2001)), followed by Sep-Pak C18 cartridge (Waters, Milford, Mass., USA) purification (Tuschl, et al., Biochemistry, 32:11658-11668 (1993)).

[0105] These RNAs (20 μM) single strands are incubated in annealing buffer (100 mM potassium acetate, 30 mM HEPES-KOH at pH 7.4, 2 mM magnesium acetate) for 1 min at 90° C. followed by 1 h at 37° C.

### Cell Culture

[0106] A cell culture known in the art to regularly express NOVX is propagated using standard conditions. 24 hours before transfection, at approximately 80% confluency, the cells are trypsinized and diluted 1:5 with fresh medium without antibiotics (1-3×105 cells/ml) and transferred to 24-well plates (500 ml/well). Transfection is performed using a commercially available lipofection kit and NOVX expression is monitored using standard techniques with positive and negative control. A positive control is cells that naturally express NOVX while a negative control is cells that do not express NOVX. Base-paired 21 and 22 nt siRNAs with overhanging 3′ ends mediate efficient sequence-specific mRNA degradation in lysates and in cell culture. Different concentrations of siRNAs are used. An efficient concentration for suppression in vitro in mammalian culture is between 25 nM to 100 nM final concentration. This indicates that siRNAs are effective at concentrations that are several orders of magnitude below the concentrations applied in conventional antisense or ribozyme gene targeting experiments.

[0107] The above method provides a way both for the deduction of NOVX siRNA sequence and the use of such siRNA for in vitro suppression. In vivo suppression may be performed using the same siRNA using well known in vivo transfection or gene therapy transfection techniques.

### Antisense Nucleic Acids

[0108] Another aspect of the invention pertains to isolated antisense nucleic acid molecules that are hybridizable to or complementary to the nucleic acid molecule comprising the nucleotide sequence of SEQ ID NO:2n−1, wherein n is an integer between 1 and 102, or fragments, analogs or derivatives thereof. An “antisense” nucleic acid comprises a nucleotide sequence that is complementary to a “sense” nucleic acid encoding a protein (e.g., complementary to the coding strand of a double-stranded cDNA molecule or complementary to an mRNA sequence). In specific aspects, antisense nucleic acid molecules are provided that comprise a sequence complementary to at least about 10, 25, 50, 100, 250 or 500 nucleotides or an entire NOVX coding strand, or to only a portion thereof. Nucleic acid molecules encoding fragments, homologs, derivatives and analogs of a NOVX protein of SEQ ID NO:2n, wherein n is an integer between 1 and 102, or antisense nucleic acids complementary to a NOVX nucleic acid sequence of SEQ ID NO:2n−1, wherein n is an integer between 1 and 102, are additionally provided.

[0109] In one embodiment, an antisense nucleic acid molecule is antisense to a “coding region” of the coding strand of a nucleotide sequence encoding a NOVX protein. The term “coding region” refers to the region of the nucleotide sequence comprising codons which are translated into amino acid residues. In another embodiment, the antisense nucleic acid molecule is antisense to a “noncoding region” of the coding strand of a nucleotide sequence encoding the NOVX protein. The term “noncoding region” refers to 5′ and 3′ sequences which flank the coding region that are not translated into amino acids (i.e., also referred to as 5′ and 3′ untranslated regions).

[0110] Given the coding strand sequences encoding the NOVX protein disclosed herein, antisense nucleic acids of the invention can be designed according to the rules of Watson and Crick or Hoogsteen base pairing. The antisense nucleic acid molecule can be complementary to the entire coding region of NOVX mRNA, but more preferably is an oligonucleotide that is antisense to only a portion of the coding or noncoding region of NOVX mRNA. For example, the antisense oligonucleotide can be complementary to the region surrounding the translation start site of NOVX mRNA. An antisense oligonucleotide can be, for example, about 5, 10, 15, 20, 25, 30, 35, 40, 45 or 50 nucleotides in length. An antisense nucleic acid of the invention can be constructed using chemical synthesis or enzymatic ligation reactions using procedures known in the art. For example, an antisense nucleic acid (e.g., an antisense oligonucleotide) can be chemically synthesized using naturally-occurring nucleotides or variously modified nucleotides designed to increase the biological stability of the molecules or to increase the physical stability of the duplex formed between the antisense and sense nucleic acids (e.g., phosphorothioate derivatives and acridine substituted nucleotides can be used).

[0111] Examples of modified nucleotides that can be used to generate the antisense nucleic acid include: 5-fluorouracil, 5-bromouracil, 5-chlorouracil, 5-iodouracil, hypoxanthine, xanthine, 4-acetylcytosine, 5-carboxymethylaminomethyl-2-thiouridine, 5-(carboxyhydroxylmethyl) uracil, 5-carboxymethylaminomethyluracil, dihydrouracil, beta-D-galactosylqueosine, inosine, N6-isopentenyladenine, 1-methylguanine, 1-methylinosine, 2,2-dimethylguanine, 2-methyladenine, 2-methylguanine, 5-methoxyuracil, 3-methylcytosine, 5-methylcytosine, N6-adenine, 7-methylguanine, 5-methylaminomethyluracil, 5-methoxyaminomethyl-2-thiouracil, 2-thiouracil, 4-thiouracil, beta-D-mannosylqueosine, 5′-methoxycarboxymethyluracil, 2-methylthio-N6-isopentenyladenine, uracil-5-oxyacetic acid (v), wybutoxosine, pseudouracil, queosine, 2-thiocytosine, 5-methyl-2-thiouracil, 5-methyluracil, uracil-5-oxyacetic acid methylester, uracil-5-oxyacetic acid (v), 5-methyl-2-thiouracil, 3-(3-amino-3-N-2-carboxypropyl) uracil, (acp3)w, and 2,6-diaminopurine. Alternatively, the antisense nucleic acid can be produced biologically using an expression vector into which a nucleic acid has been subcloned in an antisense orientation (i.e., RNA transcribed from the inserted nucleic acid will be of an antisense orientation to a target nucleic acid of interest, described further in the following subsection).

[0112] The antisense nucleic acid molecules of the invention are typically administered to a subject or generated in situ such that they hybridize with or bind to cellular mRNA and/or genomic DNA encoding a NOVX protein to thereby inhibit expression of the protein (e.g., by inhibiting transcription and/or translation). The hybridization can be by conventional nucleotide complementarity to form a stable duplex, or, for example, in the case of an antisense nucleic acid molecule that binds to DNA duplexes, through specific interactions in the major groove of the double helix. An example of a route of administration of antisense nucleic acid molecules of the invention includes direct injection at a tissue site. Alternatively, antisense nucleic acid molecules can be modified to target selected cells and then administered systemically. For example, for systemic administration, antisense molecules can be modified such that they specifically bind to receptors or antigens expressed on a selected cell surface (e.g., by linking the antisense nucleic acid molecules to peptides or antibodies that bind to cell surface receptors or antigens). The antisense nucleic acid molecules can also be delivered to cells using the vectors described herein. To achieve sufficient nucleic acid molecules, vector constructs in which the antisense nucleic acid molecule is placed under the control of a strong pol II or pol III promoter are preferred.

[0113] In yet another embodiment, the antisense nucleic acid molecule of the invention is an α-anomeric nucleic acid molecule. An α-anomeric nucleic acid molecule forms specific double-stranded hybrids with complementary RNA in which, contrary to the usual β-units, the strands run parallel to each other. See, e.g., Gaultier, et al., 1987. Nucl. Acids Res. 15: 6625-6641. The antisense nucleic acid molecule can also comprise a 2′-o-methylribonucleotide (See, e.g., Inoue, et al. 1987. Nucl. Acids Res. 15: 6131-6148) or a chimeric RNA-DNA analogue (See, e.g., Inoue, et al., 1987. FEBS Lett. 215: 327-330.

### Ribozymes and PNA Moieties

[0114] Nucleic acid modifications include, by way of non-limiting example, modified bases, and nucleic acids whose sugar phosphate backbones are modified or derivatized. These modifications are carried out at least in part to enhance the chemical stability of the modified nucleic acid, such that they may be used, for example, as antisense binding nucleic acids in therapeutic applications in a subject.

[0115] In one embodiment, an antisense nucleic acid of the invention is a ribozyme. Ribozymes are catalytic RNA molecules with ribonuclease activity that are capable of cleaving a single-stranded nucleic acid, such as an mRNA, to which they have a complementary region. Thus, ribozymes (e.g., hammerhead ribozymes as described in Haselhoff and Gerlach 1988. Nature 334: 585-591) can be used to catalytically cleave NOVX mRNA transcripts to thereby inhibit translation of NOVX mRNA. A ribozyme having specificity for a NOVX-encoding nucleic acid can be designed based upon the nucleotide sequence of a NOVX cDNA disclosed herein (i.e., SEQ ID NO:2n−1, wherein n is an integer between 1 and 102). For example, a derivative of a Tetrahymena L-19 IVS RNA can be constructed in which the nucleotide sequence of the active site is complementary to the nucleotide sequence to be cleaved in a NOVX-encoding mRNA. See, e.g., U.S. Pat. No. 4,987,071 to Cech, et al. and U.S. Pat. No. 5,116,742 to Cech, et al. NOVX mRNA can also be used to select a catalytic RNA having a specific ribonuclease activity from a pool of RNA molecules. See, e.g., Bartel et al., (1993) Science 261:1411-1418.

[0116] Alternatively, NOVX gene expression can be inhibited by targeting nucleotide sequences complementary to the regulatory region of the NOVX nucleic acid (e.g., the NOVX promoter and/or enhancers) to form triple helical structures that prevent transcription of the NOVX gene in target cells. See, e.g., Helene, 1991. Anticancer Drug Des. 6: 569-84; Helene, et al. 1992. Ann. N.Y. Acad. Sci. 660: 27-36; Maher, 1992. Bioassays 14: 807-15.

[0117] In various embodiments, the NOVX nucleic acids can be modified at the base moiety, sugar moiety or phosphate backbone to improve, e.g., the stability, hybridization, or solubility of the molecule. For example, the deoxyribose phosphate backbone of the nucleic acids can be modified to generate peptide nucleic acids. See, e.g., Hyrup, et al., 1996. Bioorg Med Chem 4: 5-23. As used herein, the terms “peptide nucleic acids” or “PNAs” refer to nucleic acid mimics (e.g., DNA mimics) in which the deoxyribose phosphate backbone is replaced by a pseudopeptide backbone and only the four natural nucleotide bases are retained. The neutral backbone of PNAs has been shown to allow for specific hybridization to DNA and RNA under conditions of low ionic strength. The synthesis of PNA oligomer can be performed using standard solid phase peptide synthesis protocols as described in Hyrup, et al., 1996. supra; Perry-O'Keefe, et al., 1996. Proc. Natl. Acad. Sci. USA 93: 14670-14675.

[0118] PNAs of NOVX can be used in therapeutic and diagnostic applications. For example, PNAs can be used as antisense or antigene agents for sequence-specific modulation of gene expression by, e.g., inducing transcription or translation arrest or inhibiting replication. PNAs of NOVX can also be used, for example, in the analysis of single base pair mutations in a gene (e.g., PNA directed PCR clamping; as artificial restriction enzymes when used in combination with other enzymes, e.g., S₁ nucleases (See, Hyrup, et al., 1996. supra); or as probes or primers for DNA sequence and hybridization (See, Hyrup, et al., 1996, supra; Perry-O'Keefe, et al., 1996. supra).

[0119] In another embodiment, PNAs of NOVX can be modified, e.g., to enhance their stability or cellular uptake, by attaching lipophilic or other helper groups to PNA, by the formation of PNA-DNA chimeras, or by the use of liposomes or other techniques of drug delivery known in the art. For example, PNA-DNA chimeras of NOVX can be generated that may combine the advantageous properties of PNA and DNA. Such chimeras allow DNA recognition enzymes (e.g., RNase H and DNA polymerases) to interact with the DNA portion while the PNA portion would provide high binding affinity and specificity. PNA-DNA chimeras can be linked using linkers of appropriate lengths selected in terms of base stacking, number of bonds between the nucleotide bases, and orientation (see, Hyrup, et al., 1996. supra). The synthesis of PNA-DNA chimeras can be performed as described in Hyrup, et al., 1996. supra and Finn, et al., 1996. Nucl Acids Res 24: 3357-3363. For example, a DNA chain can be synthesized on a solid support using standard phosphoramidite coupling chemistry, and modified nucleoside analogs, e.g., 5′-(4-methoxytrityl)amino-5′-deoxy-thymidine phosphoramidite, can be used between the PNA and the 5′ end of DNA. See, e.g., Mag, et al., 1989. Nucl Acid Res 17: 5973-5988. PNA monomers are then coupled in a stepwise manner to produce a chimeric molecule with a 5′ PNA segment and a 3′ DNA segment. See, e.g., Finn, et al., 1996. supra. Alternatively, chimeric molecules can be synthesized with a 5′ DNA segment and a 3′ PNA segment. See, e.g., Petersen, et al., 1975. Bioorg. Med. Chem. Lett. 5: 1119-11124.

[0120] In other embodiments, the oligonucleotide may include other appended groups such as peptides (e.g., for targeting host cell receptors in vivo), or agents facilitating transport across the cell membrane (see, e.g., Letsinger, et al., 1989. Proc. Natl. Acad. Sci. U.S.A. 86: 6553-6556; Lemaitre, et al., 1987. Proc. Natl. Acad. Sci. 84: 648-652; PCT Publication No. W088/09810) or the blood-brain barrier (see, e.g., PCT Publication No. WO 89/10134). In addition, oligonucleotides can be modified with hybridization triggered cleavage agents (see, e.g., Krol, et al., 1988. BioTechniques 6:958-976) or intercalating agents (see, e.g., Zon, 1988. Pharm. Res. 5: 539-549). To this end, the oligonucleotide may be conjugated to another molecule, e.g., a peptide, a hybridization triggered cross-linking agent, a transport agent, a hybridization-triggered cleavage agent, and the like.

### NOVX Polypeptides

[0121] A polypeptide according to the invention includes a polypeptide including the amino acid sequence of NOVX polypeptides whose sequences are provided in any one of SEQ ID NO:2n, wherein n is an integer between 1 and 102. The invention also includes a mutant or variant protein any of whose residues may be changed from the corresponding residues shown in any one of SEQ ID NO:2n, wherein n is an integer between 1 and 102, while still encoding a protein that maintains its NOVX activities and physiological functions, or a functional fragment thereof.

[0122] In general, a NOVX variant that preserves NOVX-like function includes any variant in which residues at a particular position in the sequence have been substituted by other amino acids, and further include the possibility of inserting an additional residue or residues between two residues of the parent protein as well as the possibility of deleting one or more residues from the parent sequence. Any amino acid substitution, insertion, or deletion is encompassed by the invention. In favorable circumstances, the substitution is a conservative substitution as defined above.

[0123] One aspect of the invention pertains to isolated NOVX proteins, and biologically-active portions thereof, or derivatives, fragments, analogs or homologs thereof. Also provided are polypeptide fragments suitable for use as immunogens to raise anti-NOVX antibodies. In one embodiment, native NOVX proteins can be isolated from cells or tissue sources by an appropriate purification scheme using standard protein purification techniques. In another embodiment, NOVX proteins are produced by recombinant DNA techniques. Alternative to recombinant expression, a NOVX protein or polypeptide can be synthesized chemically using standard peptide synthesis techniques.

[0124] An “isolated” or “purified” polypeptide or protein or biologically-active portion thereof is substantially free of cellular material or other contaminating proteins from the cell or tissue source from which the NOVX protein is derived, or substantially free from chemical precursors or other chemicals when chemically synthesized. The language “substantially free of cellular material” includes preparations of NOVX proteins in which the protein is separated from cellular components of the cells from which it is isolated or recombinantly-produced. In one embodiment, the language “substantially free of cellular material” includes preparations of NOVX proteins having less than about 30% (by dry weight) of non-NOVX proteins (also referred to herein as a “contaminating protein”), more preferably less than about 20% of non-NOVX proteins, still more preferably less than about 10% of non-NOVX proteins, and most preferably less than about 5% of non-NOVX proteins. When the NOVX protein or biologically-active portion thereof is recombinantly-produced, it is also preferably substantially free of culture medium, i.e., culture medium represents less than about 20%, more preferably less than about 10%, and most preferably less than about 5% of the volume of the NOVX protein preparation.

[0125] The language “substantially free of chemical precursors or other chemicals” includes preparations of NOVX proteins in which the protein is separated from chemical precursors or other chemicals that are involved in the synthesis of the protein. In one embodiment, the language “substantially free of chemical precursors or other chemicals” includes preparations of NOVX proteins having less than about 30% (by dry weight) of chemical precursors or non-NOVX chemicals, more preferably less than about 20% chemical precursors or non-NOVX chemicals, still more preferably less than about 10% chemical precursors or non-NOVX chemicals, and most preferably less than about 5% chemical precursors or non-NOVX chemicals.

[0126] Biologically-active portions of NOVX proteins include peptides comprising amino acid sequences sufficiently homologous to or derived from the amino acid sequences of the NOVX proteins (e.g., the amino acid sequence of SEQ ID NO:2n, wherein n is an integer between 1 and 102) that include fewer amino acids than the full-length NOVX proteins, and exhibit at least one activity of a NOVX protein. Typically, biologically-active portions comprise a domain or motif with at least one activity of the NOVX protein. A biologically-active portion of a NOVX protein can be a polypeptide which is, for example, 10, 25, 50, 100 or more amino acid residues in length.

[0127] Moreover, other biologically-active portions, in which other regions of the protein are deleted, can be prepared by recombinant techniques and evaluated for one or more of the functional activities of a native NOVX protein.

[0128] In an embodiment, the NOVX protein has an amino acid sequence of SEQ ID NO:2n, wherein n is an integer between 1 and 102. In other embodiments, the NOVX protein is substantially homologous to SEQ ID NO:2n, wherein n is an integer between 1 and 102, and retains the functional activity of the protein of SEQ ID NO:2n, wherein n is an integer between 1 and 102, yet differs in amino acid sequence due to natural allelic variation or mutagenesis, as described in detail, below. Accordingly, in another embodiment, the NOVX protein is a protein that comprises an amino acid sequence at least about 45% homologous to the amino acid sequence of SEQ ID NO:2n, wherein n is an integer between 1 and 102, and retains the functional activity of the NOVX proteins of SEQ ID NO:2n, wherein n is an integer between 1 and 102.

### Determining Homology Between Two or More Sequences

[0129] To determine the percent homology of two amino acid sequences or of two nucleic acids, the sequences are aligned for optimal comparison purposes (e.g., gaps can be introduced in the sequence of a first amino acid or nucleic acid sequence for optimal alignment with a second amino or nucleic acid sequence). The amino acid residues or nucleotides at corresponding amino acid positions or nucleotide positions are then compared. When a position in the first sequence is occupied by the same amino acid residue or nucleotide as the corresponding position in the second sequence, then the molecules are homologous at that position (i.e., as used herein amino acid or nucleic acid “homology” is equivalent to amino acid or nucleic acid “identity”).

[0130] The nucleic acid sequence homology may be determined as the degree of identity between two sequences. The homology may be determined using computer programs known in the art, such as GAP software provided in the GCG program package. See, Needleman and Wunsch, 1970. J Mol Biol 48: 443-453. Using GCG GAP software with the following settings for nucleic acid sequence comparison: GAP creation penalty of 5.0 and GAP extension penalty of 0.3, the coding region of the analogous nucleic acid sequences referred to above exhibits a degree of identity preferably of at least 70%, 75%, 80%, 85%, 90%, 95%, 98%, or 99%, with the CDS (encoding) part of the DNA sequence of SEQ ID NO:2n−1, wherein n is an integer between 1 and 102.

[0131] The term “sequence identity” refers to the degree to which two polynucleotide or polypeptide sequences are identical on a residue-by-residue basis over a particular region of comparison. The term “percentage of sequence identity” is calculated by comparing two optimally aligned sequences over that region of comparison, determining the number of positions at which the identical nucleic acid base (e.g., A, T, C, G, U, or I, in the case of nucleic acids) occurs in both sequences to yield the number of matched positions, dividing the number of matched positions by the total number of positions in the region of comparison (i.e., the window size), and multiplying the result by 100 to yield the percentage of sequence identity. The term “substantial identity” as used herein denotes a characteristic of a polynucleotide sequence, wherein the polynucleotide comprises a sequence that has at least 80 percent sequence identity, preferably at least 85 percent identity and often 90 to 95 percent sequence identity, more usually at least 99 percent sequence identity as compared to a reference sequence over a comparison region.

### Chimeric and Fusion Proteins

[0132] The invention also provides NOVX chimeric or fusion proteins. As used herein, a NOVX “chimeric protein” or “fusion protein” comprises a NOVX polypeptide operatively-linked to a non-NOVX polypeptide. An “NOVX polypeptide” refers to a polypeptide having an amino acid sequence corresponding to a NOVX protein of SEQ ID NO:2n, wherein n is an integer between 1 and 102, whereas a “non-NOVX polypeptide” refers to a polypeptide having an amino acid sequence corresponding to a protein that is not substantially homologous to the NOVX protein, e.g., a protein that is different from the NOVX protein and that is derived from the same or a different organism. Within a NOVX fusion protein the NOVX polypeptide can correspond to all or a portion of a NOVX protein. In one embodiment, a NOVX fusion protein comprises at least one biologically-active portion of a NOVX protein. In another embodiment, a NOVX fusion protein comprises at least two biologically-active portions of a NOVX protein. In yet another embodiment, a NOVX fusion protein comprises at least three biologically-active portions of a NOVX protein. Within the fusion protein, the term “operatively-linked” is intended to indicate that the NOVX polypeptide and the non-NOVX polypeptide are fused in-frame with one another. The non-NOVX polypeptide can be fused to the N-terminus or C-terminus of the NOVX polypeptide.

[0133] In one embodiment, the fusion protein is a GST-NOVX fusion protein in which the NOVX sequences are fused to the C-terminus of the GST (glutathione S-transferase) sequences. Such fusion proteins can facilitate the purification of recombinant NOVX polypeptides.

[0134] In another embodiment, the fusion protein is a NOVX protein containing a heterologous signal sequence at its N-terminus. In certain host cells (e.g., mammalian host cells), expression and/or secretion of NOVX can be increased through use of a heterologous signal sequence.

[0135] In yet another embodiment, the fusion protein is a NOVX-immunoglobulin fusion protein in which the NOVX sequences are fused to sequences derived from a member of the immunoglobulin protein family. The NOVX-immunoglobulin fusion proteins of the invention can be incorporated into pharmaceutical compositions and administered to a subject to inhibit an interaction between a NOVX ligand and a NOVX protein on the surface of a cell, to thereby suppress NOVX-mediated signal transduction in vivo. The NOVX-immunoglobulin fusion proteins can be used to affect the bioavailability of a NOVX cognate ligand. Inhibition of the NOVX ligand/NOVX interaction may be useful therapeutically for both the treatment of proliferative and differentiative disorders, as well as modulating (e.g. promoting or inhibiting) cell survival. Moreover, the NOVX-immunoglobulin fusion proteins of the invention can be used as immunogens to produce anti-NOVX antibodies in a subject, to purify NOVX ligands, and in screening assays to identify molecules that inhibit the interaction of NOVX with a NOVX ligand.

[0136] A NOVX chimeric or fusion protein of the invention can be produced by standard recombinant DNA techniques. For example, DNA fragments coding for the different polypeptide sequences are ligated together in-frame in accordance with conventional techniques, e.g., by employing blunt-ended or stagger-ended termini for ligation, restriction enzyme digestion to provide for appropriate termini, filling-in of cohesive ends as appropriate, alkaline phosphatase treatment to avoid undesirable joining, and enzymatic ligation. In another embodiment, the fusion gene can be synthesized by conventional techniques including automated DNA synthesizers. Alternatively, PCR amplification of gene fragments can be carried out using anchor primers that give rise to complementary overhangs between two consecutive gene fragments that can subsequently be annealed and reamplified to generate a chimeric gene sequence (see, e.g., Ausubel, et al. (eds.) CURRENT PROTOCOLS IN MOLECULAR BIOLOGY, John Wiley & Sons, 1992). Moreover, many expression vectors are commercially available that already encode a fusion moiety (e.g., a GST polypeptide). A NOVX-encoding nucleic acid can be cloned into such an expression vector such that the fusion moiety is linked in-frame to the NOVX protein.

### NOVX Agonists and Antagonists

[0137] The invention also pertains to variants of the NOVX proteins that function as either NOVX agonists (i.e., mimetics) or as NOVX antagonists. Variants of the NOVX protein can be generated by mutagenesis (e.g., discrete point mutation or truncation of the NOVX protein). An agonist of the NOVX protein can retain substantially the same, or a subset of, the biological activities of the naturally occurring form of the NOVX protein. An antagonist of the NOVX protein can inhibit one or more of the activities of the naturally occurring form of the NOVX protein by, for example, competitively binding to a downstream or upstream member of a cellular signaling cascade which includes the NOVX protein. Thus, specific biological effects can be elicited by treatment with a variant of limited function. In one embodiment, treatment of a subject with a variant having a subset of the biological activities of the naturally occurring form of the protein has fewer side effects in a subject relative to treatment with the naturally occurring form of the NOVX proteins.

[0138] Variants of the NOVX proteins that function as either NOVX agonists (i.e., mimetics) or as NOVX antagonists can be identified by screening combinatorial libraries of mutants (e.g., truncation mutants) of the NOVX proteins for NOVX protein agonist or antagonist activity. In one embodiment, a variegated library of NOVX variants is generated by combinatorial mutagenesis at the nucleic acid level and is encoded by a variegated gene library. A variegated library of NOVX variants can be produced by, for example, enzymatically ligating a mixture of synthetic oligonucleotides into gene sequences such that a degenerate set of potential NOVX sequences is expressible as individual polypeptides, or alternatively, as a set of larger fusion proteins (e.g., for phage display) containing the set of NOVX sequences therein. There are a variety of methods which can be used to produce libraries of potential NOVX variants from a degenerate oligonucleotide sequence. Chemical synthesis of a degenerate gene sequence can be performed in an automatic DNA synthesizer, and the synthetic gene then ligated into an appropriate expression vector. Use of a degenerate set of genes allows for the provision, in one mixture, of all of the sequences encoding the desired set of potential NOVX sequences. Methods for synthesizing degenerate oligonucleotides are well-known within the art. See, e.g., Narang, 1983. Tetrahedron 39: 3; Itakura, et al., 1984. Annu. Rev. Biochem. 53: 323; Itakura, et al., 1984. Science 198: 1056; Ike, et al., 1983. Nucl. Acids Res. 11: 477.

### Polypeptide Libraries

[0139] In addition, libraries of fragments of the NOVX protein coding sequences can be used to generate a variegated population of NOVX fragments for screening and subsequent selection of variants of a NOVX protein. In one embodiment, a library of coding sequence fragments can be generated by treating a double stranded PCR fragment of a NOVX coding sequence with a nuclease under conditions wherein nicking occurs only about once per molecule, denaturing the double stranded DNA, renaturing the DNA to form double-stranded DNA that can include sense/antisense pairs from different nicked products, removing single stranded portions from reformed duplexes by treatment with Si nuclease, and ligating the resulting fragment library into an expression vector. By this method, expression libraries can be derived which encodes N-terminal and internal fragments of various sizes of the NOVX proteins.

[0140] Various techniques are known in the art for screening gene products of combinatorial libraries made by point mutations or truncation, and for screening cDNA libraries for gene products having a selected property. Such techniques are adaptable for rapid screening of the gene libraries generated by the combinatorial mutagenesis of NOVX proteins. The most widely used techniques, which are amenable to high throughput analysis, for screening large gene libraries typically include cloning the gene library into replicable expression vectors, transforming appropriate cells with the resulting library of vectors, and expressing the combinatorial genes under conditions in which detection of a desired activity facilitates isolation of the vector encoding the gene whose product was detected. Recursive ensemble mutagenesis (REM), a new technique that enhances the frequency of functional mutants in the libraries, can be used in combination with the screening assays to identify NOVX variants. See, e.g., Arkin and Yourvan, 1992. Proc. Natl. Acad. Sci. USA 89: 7811-7815; Delgrave, et al., 1993. Protein Engineering 6:327-331.

### NOVX Antibodies

[0141] The term “antibody” as used herein refers to immunoglobulin molecules and immunologically active portions of immunoglobulin (Ig) molecules, i.e., molecules that contain an antigen binding site that specifically binds (immunoreacts with) an antigen. Such antibodies include, but are not limited to, polyclonal, monoclonal, chimeric, single chain, F_{ab}, F_{ab′} and F_{(ab′)2} fragments, and an F_{ab} expression library. In general, antibody molecules obtained from humans relates to any of the classes IgG, IgM, IgA, IgE and IgD, which differ from one another by the nature of the heavy chain present in the molecule. Certain classes have subclasses as well, such as IgG₁, IgG₂, and others. Furthermore, in humans, the light chain may be a kappa chain or a lambda chain. Reference herein to antibodies includes a reference to all such classes, subclasses and types of human antibody species.

[0142] An isolated protein of the invention intended to serve as an antigen, or a portion or fragment thereof, can be used as an immunogen to generate antibodies that immunospecifically bind the antigen, using standard techniques for polyclonal and monoclonal antibody preparation. The full-length protein can be used or, alternatively, the invention provides antigenic peptide fragments of the antigen for use as immunogens. An antigenic peptide fragment comprises at least 6 amino acid residues of the amino acid sequence of the full length protein, such as an amino acid sequence of SEQ ID NO:2n, wherein n is an integer between 1 and 102, and encompasses an epitope thereof such that an antibody raised against the peptide forms a specific immune complex with the full length protein or with any fragment that contains the epitope. Preferably, the antigenic peptide comprises at least 10 amino acid residues, or at least 15 amino acid residues, or at least 20 amino acid residues, or at least 30 amino acid residues. Preferred epitopes encompassed by the antigenic peptide are regions of the protein that are located on its surface; commonly these are hydrophilic regions.

[0143] In certain embodiments of the invention, at least one epitope encompassed by the antigenic peptide is a region of NOVX that is located on the surface of the protein, e.g., a hydrophilic region. A hydrophobicity analysis of the human NOVX protein sequence will indicate which regions of a NOVX polypeptide are particularly hydrophilic and, therefore, are likely to encode surface residues useful for targeting antibody production. As a means for targeting antibody production, hydropathy plots showing regions of hydrophilicity and hydrophobicity may be generated by any method well known in the art, including, for example, the Kyte Doolittle or the Hopp Woods methods, either with or without Fourier transformation. See, e.g., Hopp and Woods, 1981, Proc. Nat. Acad. Sci. USA 78: 3824-3828; Kyte and Doolittle 1982, J. Mol. Biol. 157: 105-142, each incorporated herein by reference in their entirety. Antibodies that are specific for one or more domains within an antigenic protein, or derivatives, fragments, analogs or homologs thereof, are also provided herein.

[0144] The term “epitope” includes any protein determinant capable of specific binding to an immunoglobulin or T-cell receptor. Epitopic determinants usually consist of chemically active surface groupings of molecules such as amino acids or sugar side chains and usually have specific three dimensional structural characteristics, as well as specific charge characteristics. A NOVX polypeptide or a fragment thereof comprises at least one antigenic epitope. An anti-NOVX antibody of the present invention is said to specifically bind to antigen NOVX when the equilibrium binding constant (K_{D}) is ≦1 μM, preferably ≦100 nM, more preferably ≦10 nM, and most preferably ≦100 μM to about 1 μM, as measured by assays such as radioligand binding assays or similar assays known to those skilled in the art.

[0145] A protein of the invention, or a derivative, fragment, analog, homolog or ortholog thereof, may be utilized as an immunogen in the generation of antibodies that immunospecifically bind these protein components.

[0146] Various procedures known within the art may be used for the production of polyclonal or monoclonal antibodies directed against a protein of the invention, or against derivatives, fragments, analogs homologs or orthologs thereof (see, for example, Antibodies: A Laboratory Manual, Harlow E, and Lane D, 1988, Cold Spring Harbor Laboratory Press, Cold Spring Harbor, N.Y., incorporated herein by reference). Some of these antibodies are discussed below.

### Polyclonal Antibodies

[0147] For the production of polyclonal antibodies, various suitable host animals (e.g., rabbit, goat, mouse or other mammal) may be immunized by one or more injections with the native protein, a synthetic variant thereof, or a derivative of the foregoing. An appropriate immunogenic preparation can contain, for example, the naturally occurring immunogenic protein, a chemically synthesized polypeptide representing the immunogenic protein, or a recombinantly expressed immunogenic protein. Furthermore, the protein may be conjugated to a second protein known to be immunogenic in the mammal being immunized. Examples of such immunogenic proteins include but are not limited to keyhole limpet hemocyanin, serum albumin, bovine thyroglobulin, and soybean trypsin inhibitor. The preparation can further include an adjuvant. Various adjuvants used to increase the immunological response include, but are not limited to, Freund's (complete and incomplete), mineral gels (e.g., aluminum hydroxide), surface active substances (e.g., lysolecithin, pluronic polyols, polyanions, peptides, oil emulsions, dinitrophenol, etc.), adjuvants usable in humans such as Bacille Calmette-Guerin and Corynebacterium parvum, or similar immunostimulatory agents. Additional examples of adjuvants which can be employed include MPL-TDM adjuvant (monophosphoryl Lipid A, synthetic trehalose dicorynomycolate).

[0148] The polyclonal antibody molecules directed against the immunogenic protein can be isolated from the mammal (e.g., from the blood) and further purified by well known techniques, such as affinity chromatography using protein A or protein G, which provide primarily the IgG fraction of immune serum. Subsequently, or alternatively, the specific antigen which is the target of the immunoglobulin sought, or an epitope thereof, may be immobilized on a column to purify the immune specific antibody by immunoaffinity chromatography. Purification of immunoglobulins is discussed, for example, by D. Wilkinson (The Scientist, published by The Scientist, Inc., Philadelphia Pa., Vol. 14, No. 8 (Apr. 17, 2000), pp. 25-28).

### Monoclonal Antibodies

[0149] The term “monoclonal antibody” (MAb) or “monoclonal antibody composition”, as used herein, refers to a population of antibody molecules that contain only one molecular species of antibody molecule consisting of a unique light chain gene product and a unique heavy chain gene product. In particular, the complementarity determining regions (CDRs) of the monoclonal antibody are identical in all the molecules of the population. MAbs thus contain an antigen binding site capable of immunoreacting with a particular epitope of the antigen characterized by a unique binding affinity for it.

[0150] Monoclonal antibodies can be prepared using hybridoma methods, such as those described by Kohler and Milstein, Nature, 256:495 (1975). In a hybridoma method, a mouse, hamster, or other appropriate host animal, is typically immunized with an immunizing agent to elicit lymphocytes that produce or are capable of producing antibodies that will specifically bind to the immunizing agent. Alternatively, the lymphocytes can be immunized in vitro.

[0151] The immunizing agent will typically include the protein antigen, a fragment thereof or a fusion protein thereof. Generally, either peripheral blood lymphocytes are used if cells of human origin are desired, or spleen cells or lymph node cells are used if non-human mammalian sources are desired. The lymphocytes are then fused with an immortalized cell line using a suitable fusing agent, such as polyethylene glycol, to form a hybridoma cell (Goding, Monoclonal Antibodies: Principles and Practice, Academic Press, (1986) pp. 59-103). Immortalized cell lines are usually transformed mammalian cells, particularly myeloma cells of rodent, bovine and human origin. Usually, rat or mouse myeloma cell lines are employed. The hybridoma cells can be cultured in a suitable culture medium that preferably contains one or more substances that inhibit the growth or survival of the unfused, immortalized cells. For example, if the parental cells lack the enzyme hypoxanthine guanine phosphoribosyl transferase (HGPRT or HPRT), the culture medium for the hybridomas typically will include hypoxanthine, aminopterin, and thymidine (“HAT medium”), which substances prevent the growth of HGPRT-deficient cells.

[0152] Preferred immortalized cell lines are those that fuse efficiently, support stable high level expression of antibody by the selected antibody-producing cells, and are sensitive to a medium such as HAT medium. More preferred immortalized cell lines are murine myeloma lines, which can be obtained, for instance, from the Salk Institute Cell Distribution Center, San Diego, Calif. and the American Type Culture Collection, Manassas, Va. Human myeloma and mouse-human heteromyeloma cell lines also have been described for the production of human monoclonal antibodies (Kozbor, J. Immunol., 133:3001 (1984); Brodeur et al., Monoclonal Antibody Production Techniques and Applications, Marcel Dekker, Inc., New York, (1987) pp. 51-63).

[0153] The culture medium in which the hybridoma cells are cultured can then be assayed for the presence of monoclonal antibodies directed against the antigen. Preferably, the binding specificity of monoclonal antibodies produced by the hybridoma cells is determined by immunoprecipitation or by an in vitro binding assay, such as radioimmunoassay (RIA) or enzyme-linked immunoabsorbent assay (ELISA). Such techniques and assays are known in the art. The binding affinity of the monoclonal antibody can, for example, be determined by the Scatchard analysis of Munson and Pollard, Anal. Biochem., 107:220 (1980). It is an objective, especially important in therapeutic applications of monoclonal antibodies, to identify antibodies having a high degree of specificity and a high binding affinity for the target antigen.

[0154] After the desired hybridoma cells are identified, the clones can be subcloned by limiting dilution procedures and grown by standard methods (Goding,1986). Suitable culture media for this purpose include, for example, Dulbecco's Modified Eagle's Medium and RPMI-1640 medium. Alternatively, the hybridoma cells can be grown in vivo as ascites in a mammal.

[0155] The monoclonal antibodies secreted by the subclones can be isolated or purified from the culture medium or ascites fluid by conventional immunoglobulin purification procedures such as, for example, protein A-Sepharose, hydroxylapatite chromatography, gel electrophoresis, dialysis, or affinity chromatography.

[0156] The monoclonal antibodies can also be made by recombinant DNA methods, such as those described in U.S. Pat. No. 4,816,567. DNA encoding the monoclonal antibodies of the invention can be readily isolated and sequenced using conventional procedures (e.g., by using oligonucleotide probes that are capable of binding specifically to genes encoding the heavy and light chains of murine antibodies). The hybridoma cells of the invention serve as a preferred source of such DNA. Once isolated, the DNA can be placed into expression vectors, which are then transfected into host cells such as simian COS cells, Chinese hamster ovary (CHO) cells, or myeloma cells that do not otherwise produce immunoglobulin protein, to obtain the synthesis of monoclonal antibodies in the recombinant host cells. The DNA also can be modified, for example, by substituting the coding sequence for human heavy and light chain constant domains in place of the homologous murine sequences (U.S. Pat. No. 4,816,567; Morrison, Nature 368, 812-13 (1994)) or by covalently joining to the immunoglobulin coding sequence all or part of the coding sequence for a non-immunoglobulin polypeptide. Such a non-immunoglobulin polypeptide can be substituted for the constant domains of an antibody of the invention, or can be substituted for the variable domains of one antigen-combining site of an antibody of the invention to create a chimeric bivalent antibody.

### Humanized Antibodies

[0157] The antibodies directed against the protein antigens of the invention can further comprise humanized antibodies or human antibodies. These antibodies are suitable for administration to humans without engendering an immune response by the human against the administered immunoglobulin. Humanized forms of antibodies are chimeric immunoglobulins, immunoglobulin chains or fragments thereof (such as Fv, Fab, Fab′, F(ab′)₂ or other antigen-binding subsequences of antibodies) that are principally comprised of the sequence of a human immunoglobulin, and contain minimal sequence derived from a non-human immunoglobulin. Humanization can be performed following the method of Winter and co-workers (Jones et al., Nature, 321:522-525 (1986); Riechmann et al., Nature, 332:323-327 (1988); Verhoeyen et al., Science, 239:1534-1536 (1988)), by substituting rodent CDRs or CDR sequences for the corresponding sequences of a human antibody. (See also U.S. Pat. No. 5,225,539.) In some instances, Fv framework residues of the human immunoglobulin are replaced by corresponding non-human residues. Humanized antibodies can also comprise residues which are found neither in the recipient antibody nor in the imported CDR or framework sequences. In general, the humanized antibody will comprise substantially all of at least one, and typically two, variable domains, in which all or substantially all of the CDR regions correspond to those of a non-human immunoglobulin and all or substantially all of the framework regions are those of a human immunoglobulin consensus sequence. The humanized antibody optimally also will comprise at least a portion of an immunoglobulin constant region (Fc), typically that of a human immunoglobulin (Jones et al., 1986; Riechmann et al., 1988; and Presta, Curr. Op. Struct. Biol., 2:593-596 (1992)).

### Human Antibodies

[0158] Fully human antibodies essentially relate to antibody molecules in which the entire sequence of both the light chain and the heavy chain, including the CDRs, arise from human genes. Such antibodies are termed “human antibodies”, or “fully human antibodies” herein. Human monoclonal antibodies can be prepared by the trioma technique; the human B-cell hybridoma technique (see Kozbor, et al., 1983 Immunol Today 4: 72) and the EBV hybridoma technique to produce human monoclonal antibodies (see Cole, et al., 1985 In: MONOCLONAL ANTIBODIES AND CANCER THERAPY, Alan R. Liss, Inc., pp. 77-96). Human monoclonal antibodies may be utilized in the practice of the present invention and may be produced by using human hybridomas (see Cote, et al., 1983. Proc Natl Acad Sci USA 80: 2026-2030) or by transforming human B-cells with Epstein Barr Virus in vitro (see Cole, et al., 1985 In: MONOCLONAL ANTIBODIES AND CANCER THERAPY, Alan R. Liss, Inc., pp. 77-96).

[0159] In addition, human antibodies can also be produced using additional techniques, including phage display libraries (Hoogenboom and Winter, J. Mol. Biol., 227:381 (1991); Marks et al., J. Mol. Biol., 222:581 (1991)). Similarly, human antibodies can be made by introducing human immunoglobulin loci into transgenic animals, e.g., mice in which the endogenous immunoglobulin genes have been partially or completely inactivated. Upon challenge, human antibody production is observed, which closely resembles that seen in humans in all respects, including gene rearrangement, assembly, and antibody repertoire. This approach is described, for example, in U.S. Pat. Nos. 5,545,807; 5,545,806; 5,569,825; 5,625,126; 5,633,425; 5,661,016, and in Marks et al. (Bio/Technology 10, 779-783 (1992)); Lonberg et al. (Nature 368 856-859 (1994)); Morrison (Nature 368, 812-13 (1994)); Fishwild et al,(Nature Biotechnology 14, 845-51 (1996)); Neuberger (Nature Biotechnology 14, 826 (1996)); and Lonberg and Huszar (Intern. Rev. Immunol. 13 65-93 (1995)).

[0160] Human antibodies may additionally be produced using transgenic nonhuman animals which are modified so as to produce fully human antibodies rather than the animal's endogenous antibodies in response to challenge by an antigen. (See PCT publication W094/02602). The endogenous genes encoding the heavy and light immunoglobulin chains in the nonhuman host have been incapacitated, and active loci encoding human heavy and light chain immunoglobulins are inserted into the host's genome. The human genes are incorporated, for example, using yeast artificial chromosomes containing the requisite human DNA segments. An animal which provides all the desired modifications is then obtained as progeny by crossbreeding intermediate transgenic animals containing fewer than the full complement of the modifications. The preferred embodiment of such a nonhuman animal is a mouse, and is termed the Xenomouse™ as disclosed in PCT publications WO 96/33735 and WO 96/34096. This animal produces B cells which secrete fully human immunoglobulins. The antibodies can be obtained directly from the animal after immunization with an immunogen of interest, as, for example, a preparation of a polyclonal antibody, or alternatively from immortalized B cells derived from the animal, such as hybridomas producing monoclonal antibodies. Additionally, the genes encoding the immunoglobulins with human variable regions can be recovered and expressed to obtain the antibodies directly, or can be further modified to obtain analogs of antibodies such as, for example, single chain Fv molecules.

[0161] An example of a method of producing a nonhuman host, exemplified as a mouse, lacking expression of an endogenous immunoglobulin heavy chain is disclosed in U.S. Pat. No. 5,939,598. It can be obtained by a method including deleting the J segment genes from at least one endogenous heavy chain locus in an embryonic stem cell to prevent rearrangement of the locus and to prevent formation of a transcript of a rearranged immunoglobulin heavy chain locus, the deletion being effected by a targeting vector containing a gene encoding a selectable marker; and producing from the embryonic stem cell a transgenic mouse whose somatic and germ cells contain the gene encoding the selectable marker.

[0162] A method for producing an antibody of interest, such as a human antibody, is disclosed in U.S. Pat. No. 5,916,771. It includes introducing an expression vector that contains a nucleotide sequence encoding a heavy chain into one mammalian host cell in culture, introducing an expression vector containing a nucleotide sequence encoding a light chain into another mammalian host cell, and fusing the two cells to form a hybrid cell. The hybrid cell expresses an antibody containing the heavy chain and the light chain.

[0163] In a further improvement on this procedure, a method for identifying a clinically relevant epitope on an immunogen, and a correlative method for selecting an antibody that binds immunospecifically to the relevant epitope with high affinity, are disclosed in PCT publication WO 99/53049.

### F_{ab} Fragments and Single Chain Antibodies

[0164] According to the invention, techniques can be adapted for the production of single-chain antibodies specific to an antigenic protein of the invention (see e.g., U.S. Pat. No. 4,946,778). In addition, methods can be adapted for the construction of F_{ab} expression libraries (see e.g., Huse, et al., 1989 Science 246: 1275-1281) to allow rapid and effective identification of monoclonal F_{ab} fragments with the desired specificity for a protein or derivatives, fragments, analogs or homologs thereof. Antibody fragments that contain the idiotypes to a protein antigen may be produced by techniques known in the art including, but not limited to: (i) an F_{(ab′)2} fragment produced by pepsin digestion of an antibody molecule; (ii) an F_{ab} fragment generated by reducing the disulfide bridges of an F_{(ab′)2} fragment; (iii) an F_{ab} fragment generated by the treatment of the antibody molecule with papain and a reducing agent and (iv) Fᵥ fragments.

### Bispecific Antibodies

[0165] Bispecific antibodies are monoclonal, preferably human or humanized, antibodies that have binding specificities for at least two different antigens. In the present case, one of the binding specificities is for an antigenic protein of the invention. The second binding target is any other antigen, and advantageously is a cell-surface protein or receptor or receptor subunit.

[0166] Methods for making bispecific antibodies are known in the art. Traditionally, the recombinant production of bispecific antibodies is based on the co-expression of two immunoglobulin heavy-chain/light-chain pairs, where the two heavy chains have different specificities (Milstein and Cuello, Nature, 305:537-539 (1983)). Because of the random assortment of immunoglobulin heavy and light chains, these hybridomas (quadromas) produce a potential mixture of ten different antibody molecules, of which only one has the correct bispecific structure. The purification of the correct molecule is usually accomplished by affinity chromatography steps. Similar procedures are disclosed in WO 93/08829, published 13 May 1993, and in Traunecker et al., EMBO J., 10:3655-3659 (1991).

[0167] Antibody variable domains with the desired binding specificities (antibody-antigen combining sites) can be fused to immunoglobulin constant domain sequences. The fusion preferably is with an immunoglobulin heavy-chain constant domain, comprising at least part of the hinge, CH2, and CH3 regions. It is preferred to have the first heavy-chain constant region (CH1) containing the site necessary for light-chain binding present in at least one of the fusions. DNAs encoding the immunoglobulin heavy-chain fusions and, if desired, the immunoglobulin light chain, are inserted into separate expression vectors, and are co-transfected into a suitable host organism. For further details of generating bispecific antibodies see, for example, Suresh et al., Methods in Enzymology, 121:210 (1986).

[0168] According to another approach described in WO 96/27011, the interface between a pair of antibody molecules can be engineered to maximize the percentage of heterodimers which are recovered from recombinant cell culture. The preferred interface comprises at least a part of the CH3 region of an antibody constant domain. In this method, one or more small amino acid side chains from the interface of the first antibody molecule are replaced with larger side chains (e.g. tyrosine or tryptophan). Compensatory “cavities” of identical or similar size to the large side chain(s) are created on the interface of the second antibody molecule by replacing large amino acid side chains with smaller ones (e.g. alanine or threonine). This provides a mechanism for increasing the yield of the heterodimer over other unwanted end-products such as homodimers.

[0169] Bispecific antibodies can be prepared as full length antibodies or antibody fragments (e.g. F(ab′)₂ bispecific antibodies). Techniques for generating bispecific antibodies from antibody fragments have been described in the literature. For example, bispecific antibodies can be prepared using chemical linkage. Brennan et al., Science 229:81 (1985) describe a procedure wherein intact antibodies are proteolytically cleaved to generate F_{(ab′)2} fragments. These fragments are reduced in the presence of the dithiol complexing agent sodium arsenite to stabilize vicinal dithiols and prevent intermolecular disulfide formation. The Fab′ fragments generated are then converted to thionitrobenzoate (TNB) derivatives. One of the Fab′-TNB derivatives is then reconverted to the Fab′-thiol by reduction with mercaptoethylamine and is mixed with an equimolar amount of the other Fab′-TNB derivative to form the bispecific antibody. The bispecific antibodies produced can be used as agents for the selective immobilization of enzymes.

[0170] Additionally, Fab′ fragments can be directly recovered from E. coli and chemically coupled to form bispecific antibodies. Shalaby et al., J. Exp. Med. 175:217-225 (1992) describe the production of a fully humanized bispecific antibody F(ab′)₂ molecule. Each Fab′ fragment was separately secreted from E. coli and subjected to directed chemical coupling in vitro to form the bispecific antibody. The bispecific antibody thus formed was able to bind to cells overexpressing the ErbB2 receptor and normal human T cells, as well as trigger the lytic activity of human cytotoxic lymphocytes against human breast tumor targets.

[0171] Various techniques for making and isolating bispecific antibody fragments directly from recombinant cell culture have also been described. For example, bispecific antibodies have been produced using leucine zippers. Kostelny et al., J. Immunol. 148(5): 1547-1553 (1992). The leucine zipper peptides from the Fos and Jun proteins were linked to the Fab′ portions of two different antibodies by gene fusion. The antibody homodimers were reduced at the hinge region to form monomers and then re-oxidized to form the antibody heterodimers. This method can also be utilized for the production of antibody homodimers. The “diabody” technology described by Hollinger et al., Proc. Natl. Acad. Sci. USA 90:6444-6448 (1993) has provided an alternative mechanism for making bispecific antibody fragments. The fragments comprise a heavy-chain variable domain (V_{H}) connected to a light-chain variable domain (V_{L}) by a linker which is too short to allow pairing between the two domains on the same chain. Accordingly, the V_{H} and V_{L} domains of one fragment are forced to pair with the complementary V_{L} and V_{H} domains of another fragment, thereby forming two antigen-binding sites. Another strategy for making bispecific antibody fragments by the use of single-chain Fv (sFv) dimers has also been reported. See, Gruber et al., J. Immunol. 152:5368 (1994).

[0172] Antibodies with more than two valencies are contemplated. For example, trispecific antibodies can be prepared. Tutt et al., J. Immunol. 147:60 (1991).

[0173] Exemplary bispecific antibodies can bind to two different epitopes, at least one of which originates in the protein antigen of the invention. Alternatively, an anti-antigenic arm of an immunoglobulin molecule can be combined with an arm which binds to a triggering molecule on a leukocyte such as a T-cell receptor molecule (e.g. CD2, CD3, CD28, or B7), or Fc receptors for IgG (FcγR), such as FcγRI (CD64), FcγRII (CD32) and FcγRIII (CD 16) so as to focus cellular defense mechanisms to the cell expressing the particular antigen. Bispecific antibodies can also be used to direct cytotoxic agents to cells which express a particular antigen. These antibodies possess an antigen-binding arm and an arm which binds a cytotoxic agent or a radionuclide chelator, such as EOTUBE, DPTA, DOTA, or TETA. Another bispecific antibody of interest binds the protein antigen described herein and further binds tissue factor (TF).

### Heteroconjugate Antibodies

[0174] Heteroconjugate antibodies are also within the scope of the present invention. Heteroconjugate antibodies are composed of two covalently joined antibodies. Such antibodies have, for example, been proposed to target immune system cells to unwanted cells (U.S. Pat. No. 4,676,980), and for treatment of HIV infection (WO 91/00360; WO 92/200373; EP 03089). It is contemplated that the antibodies can be prepared in vitro using known methods in synthetic protein chemistry, including those involving crosslinking agents. For example, immunotoxins can be constructed using a disulfide exchange reaction or by forming a thioether bond. Examples of suitable reagents for this purpose include iminothiolate and methyl-4-mercaptobutyrimidate and those disclosed, for example, in U.S. Pat. No. 4,676,980.

### Effector Function Engineering

[0175] It can be desirable to modify the antibody of the invention with respect to effector function, so as to enhance, e.g., the effectiveness of the antibody in treating cancer. For example, cysteine residue(s) can be introduced into the Fc region, thereby allowing interchain disulfide bond formation in this region. The homodimeric antibody thus generated can have improved internalization capability and/or increased complement-mediated cell killing and antibody-dependent cellular cytotoxicity (ADCC). See Caron et al., J. Exp Med., 176: 1191-1195 (1992) and Shopes, J. Immunol., 148: 2918-2922 (1992). Homodimeric antibodies with enhanced anti-tumor activity can also be prepared using heterobifunctional cross-linkers as described in Wolff et al. Cancer Research, 53: 2560-2565 (1993). Alternatively, an antibody can be engineered that has dual Fc regions and can thereby have enhanced complement lysis and ADCC capabilities. See Stevenson et al., Anti-Cancer Drug Design. 3: 219-230 (1989).

### Immunoconjugates

[0176] The invention also pertains to immunoconjugates comprising an antibody conjugated to a cytotoxic agent such as a chemotherapeutic agent, toxin (e.g., an enzymatically active toxin of bacterial, fungal, plant, or animal origin, or fragments thereof), or a radioactive isotope (i.e., a radioconjugate).

[0177] Chemotherapeutic agents useful in the generation of such immunoconjugates have been described above. Enzymatically active toxins and fragments thereof that can be used include diphtheria A chain, nonbinding active fragments of diphtheria toxin, exotoxin A chain (from Pseudomonas aeruginosa), ricin A chain, abrin A chain, modeccin A chain, alpha-sarcin, Aleurites fordii proteins, dianthin proteins, Phytolaca americana proteins (PAPI, PAPII, and PAP-S), momordica charantia inhibitor, curcin, crotin, sapaonaria officinalis inhibitor, gelonin, mitogellin, restrictocin, phenomycin, enomycin, and the tricothecenes. A variety of radionuclides are available for the production of radioconjugated antibodies. Examples include ²¹²Bi, 131I, ¹³¹In, ⁹⁰Y, and ¹⁸⁶Re.

[0178] Conjugates of the antibody and cytotoxic agent are made using a variety of bifunctional protein-coupling agents such as N-succinimidyl-3-(2-pyridyldithiol) propionate (SPDP), iminothiolane (IT), bifunctional derivatives of imidoesters (such as dimethyl adipimidate HCL), active esters (such as disuccinimidyl suberate), aldehydes (such as glutareldehyde), bis-azido compounds (such as bis (p-azidobenzoyl) hexanediamine), bis-diazonium derivatives (such as bis-(p-diazoniumbenzoyl)-ethylenediamine), diisocyanates (such as tolyene 2,6-diisocyanate), and bis-active fluorine compounds (such as 1,5-difluoro-2,4-dinitrobenzene). For example, a ricin immunotoxin can be prepared as described in Vitetta et al., Science, 238: 1098 (1987). Carbon-14-labeled 1-isothiocyanatobenzyl-3-methyldiethylene triaminepentaacetic acid (MX-DTPA) is an exemplary chelating agent for conjugation of radionucleotide to the antibody. See WO94/11026.

[0179] In another embodiment, the antibody can be conjugated to a “receptor” (such streptavidin) for utilization in tumor pretargeting wherein the antibody-receptor conjugate is administered to the patient, followed by removal of unbound conjugate from the circulation using a clearing agent and then administration of a “ligand” (e.g., avidin) that is in turn conjugated to a cytotoxic agent.

### Immunoliposomes

[0180] The antibodies disclosed herein can also be formulated as immunoliposomes. Liposomes containing the antibody are prepared by methods known in the art, such as described in Epstein et al., Proc. Natl. Acad. Sci. USA, 82: 3688 (1985); Hwang et al., Proc. Natl Acad. Sci. USA, 77: 4030 (1980); and U.S. Pat. Nos. 4,485,045 and 4,544,545. Liposomes with enhanced circulation time are disclosed in U.S. Pat. No. 5,013,556.

[0181] Particularly useful liposomes can be generated by the reverse-phase evaporation method with a lipid composition comprising phosphatidylcholine, cholesterol, and PEG-derivatized phosphatidylethanolamine (PEG-PE). Liposomes are extruded through filters of defined pore size to yield liposomes with the desired diameter. Fab′ fragments of the antibody of the present invention can be conjugated to the liposomes as described in Martin et al ., J. Biol. Chem., 257: 286-288 (1982) via a disulfide-interchange reaction. A chemotherapeutic agent (such as Doxorubicin) is optionally contained within the liposome. See Gabizon et al., J. National Cancer Inst., 81(19): 1484 (1989).

### Diagnostic Applications of Antibodies Directed Against the Proteins of the Invention

[0182] Antibodies directed against a protein of the invention may be used in methods known within the art relating to the localization and/or quantitation of the protein (e.g., for use in measuring levels of the protein within appropriate physiological samples, for use in diagnostic methods, for use in imaging the protein, and the like). In a given embodiment, antibodies against the proteins, or derivatives, fragments, analogs or homologs thereof, that contain the antigen binding domain, are utilized as pharmacologically-active compounds (see below).

[0183] An antibody specific for a protein of the invention can be used to isolate the protein by standard techniques, such as immunoaffinity chromatography or immunoprecipitation. Such an antibody can facilitate the purification of the natural protein antigen from cells and of recombinantly produced antigen expressed in host cells. Moreover, such an antibody can be used to detect the antigenic protein (e.g., in a cellular lysate or cell supernatant) in order to evaluate the abundance and pattern of expression of the antigenic protein. Antibodies directed against the protein can be used diagnostically to monitor protein levels in tissue as part of a clinical testing procedure, e.g., to, for example, determine the efficacy of a given treatment regimen. Detection can be facilitated by coupling (i.e., physically linking) the antibody to a detectable substance. Examples of detectable substances include various enzymes, prosthetic groups, fluorescent materials, luminescent materials, bioluminescent materials, and radioactive materials. Examples of suitable enzymes include horseradish peroxidase, alkaline phosphatase, β-galactosidase, or acetylcholinesterase; examples of suitable prosthetic group complexes include streptavidin/biotin and avidin/biotin; examples of suitable fluorescent materials include umbelliferone, fluorescein, fluorescein isothiocyanate, rhodamine, dichlorotriazinylamine fluorescein, dansyl chloride or phycoerythrin; an example of a luminescent material includes luminol; examples of bioluminescent materials include luciferase, luciferin, and aequorin, and examples of suitable radioactive material include 125I, 131I, 35S or ³H.

### Antibody Therapeutics

[0184] Antibodies of the invention, including polyclonal, monoclonal, humanized and fully human antibodies, may used as therapeutic agents. Such agents will generally be employed to treat or prevent a disease or pathology in a subject. An antibody preparation, preferably one having high specificity and high affinity for its target antigen, is administered to the subject and will generally have an effect due to its binding with the target. Such an effect may be one of two kinds, depending on the specific nature of the interaction between the given antibody molecule and the target antigen in question. In the first instance, administration of the antibody may abrogate or inhibit the binding of the target with an endogenous ligand to which it naturally binds. In this case, the antibody binds to the target and masks a binding site of the naturally occurring ligand, wherein the ligand serves as an effector molecule. Thus the receptor mediates a signal transduction pathway for which ligand is responsible.

[0185] Alternatively, the effect may be one in which the antibody elicits a physiological result by virtue of binding to an effector binding site on the target molecule. In this case the target, a receptor having an endogenous ligand which may be absent or defective in the disease or pathology, binds the antibody as a surrogate effector ligand, initiating a receptor-based signal transduction event by the receptor.

[0186] A therapeutically effective amount of an antibody of the invention relates generally to the amount needed to achieve a therapeutic objective. As noted above, this may be a binding interaction between the antibody and its target antigen that, in certain cases, interferes with the functioning of the target, and in other cases, promotes a physiological response. The amount required to be administered will furthermore depend on the binding affinity of the antibody for its specific antigen, and will also depend on the rate at which an administered antibody is depleted from the free volume other subject to which it is administered. Common ranges for therapeutically effective dosing of an antibody or antibody fragment of the invention may be, by way of nonlimiting example, from about 0.1 mg/kg body weight to about 50 mg/kg body weight. Common dosing frequencies may range, for example, from twice daily to once a week.

### Pharmaceutical Compositions of Antibodies

[0187] Antibodies specifically binding a protein of the invention, as well as other molecules identified by the screening assays disclosed herein, can be administered for the treatment of various disorders in the form of pharmaceutical compositions. Principles and considerations involved in preparing such compositions, as well as guidance in the choice of components are provided, for example, in Remington: The Science And Practice Of Pharmacy 19th ed. (Alfonso R. Gennaro, et al., editors) Mack Pub. Co., Easton, Pa.: 1995; Drug Absorption Enhancement: Concepts, Possibilities, Limitations, And Trends, Harwood Academic Publishers, Langhorne, Pa., 1994; and Peptide And Protein Drug Delivery (Advances In Parenteral Sciences, Vol. 4), 1991, M. Dekker, New York.

[0188] If the antigenic protein is intracellular and whole antibodies are used as inhibitors, internalizing antibodies are preferred. However, liposomes can also be used to deliver the antibody, or an antibody fragment, into cells. Where antibody fragments are used, the smallest inhibitory fragment that specifically binds to the binding domain of the target protein is preferred. For example, based upon the variable-region sequences of an antibody, peptide molecules can be designed that retain the ability to bind the target protein sequence. Such peptides can be synthesized chemically and/or produced by recombinant DNA technology. See, e.g., Marasco et al., Proc. Natl. Acad. Sci. USA, 90: 7889-7893 (1993). The formulation herein can also contain more than one active compound as necessary for the particular indication being treated, preferably those with complementary activities that do not adversely affect each other. Alternatively, or in addition, the composition can comprise an agent that enhances its function, such as, for example, a cytotoxic agent, cytokine, chemotherapeutic agent, or growth-inhibitory agent. Such molecules are suitably present in combination in amounts that are effective for the purpose intended.

[0189] The active ingredients can also be entrapped in microcapsules prepared, for example, by coacervation techniques or by interfacial polymerization, for example, hydroxymethylcellulose or gelatin-microcapsules and poly-(methylmethacrylate) microcapsules, respectively, in colloidal drug delivery systems (for example, liposomes, albumin microspheres, microemulsions, nano-particles, and nanocapsules) or in macroemulsions.

[0190] The formulations to be used for in vivo administration must be sterile. This is readily accomplished by filtration through sterile filtration membranes.

[0191] Sustained-release preparations can be prepared. Suitable examples of sustained-release preparations include semipermeable matrices of solid hydrophobic polymers containing the antibody, which matrices are in the form of shaped articles, e.g., films, or microcapsules. Examples of sustained-release matrices include polyesters, hydrogels (for example, poly(2-hydroxyethyl-methacrylate), or poly(vinylalcohol)), polylactides (U.S. Pat. No. 3,773,919), copolymers of L-glutamic acid and γ ethyl-L-glutamate, non-degradable ethylene-vinyl acetate, degradable lactic acid-glycolic acid copolymers such as the LUPRON DEPOT™ (injectable microspheres composed of lactic acid-glycolic acid copolymer and leuprolide acetate), and poly-D-(−)-3-hydroxybutyric acid. While polymers such as ethylene-vinyl acetate and lactic acid-glycolic acid enable release of molecules for over 100 days, certain hydrogels release proteins for shorter time periods.

### ELISA Assay

[0192] An agent for detecting an analyte protein is an antibody capable of binding to an analyte protein, preferably an antibody with a detectable label. Antibodies can be polyclonal, or more preferably, monoclonal. An intact antibody, or a fragment thereof (e.g., F_{ab} or F_{(ab)2}) can be used. The term “labeled”, with regard to the probe or antibody, is intended to encompass direct labeling of the probe or antibody by coupling (i.e., physically linking) a detectable substance to the probe or antibody, as well as indirect labeling of the probe or antibody by reactivity with another reagent that is directly labeled. Examples of indirect labeling include detection of a primary antibody using a fluorescently-labeled secondary antibody and end-labeling of a DNA probe with biotin such that it can be detected with fluorescently-labeled streptavidin. The term “biological sample” is intended to include tissues, cells and biological fluids isolated from a subject, as well as tissues, cells and fluids present within a subject. Included within the usage of the term “biological sample”, therefore, is blood and a fraction or component of blood including blood serum, blood plasma, or lymph. That is, the detection method of the invention can be used to detect an analyte mRNA, protein, or genomic DNA in a biological sample in vitro as well as in vivo. For example, in vitro techniques for detection of an analyte mRNA include Northern hybridizations and in situ hybridizations. In vitro techniques for detection of an analyte protein include enzyme linked immunosorbent assays (ELISAs), Western blots, immunoprecipitations, and immunofluorescence. In vitro techniques for detection of an analyte genomic DNA include Southern hybridizations. Procedures for conducting immunoassays are described, for example in “ELISA: Theory and Practice: Methods in Molecular Biology”, Vol. 42, J. R. Crowther (Ed.) Human Press, Totowa, N.J., 1995; “Immunoassay”, E. Diamandis and T. Christopoulus, Academic Press, Inc., San Diego, Calif., 1996; and “Practice and Theory of Enzyme Immunoassays”, P. Tijssen, Elsevier Science Publishers, Amsterdam, 1985. Furthermore, in vivo techniques for detection of an analyte protein include introducing into a subject a labeled anti-an analyte protein antibody. For example, the antibody can be labeled with a radioactive marker whose presence and location in a subject can be detected by standard imaging techniques.

### NOVX Recombinant Expression Vectors and Host Cells

[0193] Another aspect of the invention pertains to vectors, preferably expression vectors, containing a nucleic acid encoding a NOVX protein, or derivatives, fragments, analogs or homologs thereof. As used herein, the term “vector” refers to a nucleic acid molecule capable of transporting another nucleic acid to which it has been linked. One type of vector is a “plasmid”, which refers to a circular double stranded DNA loop into which additional DNA segments can be ligated. Another type of vector is a viral vector, wherein additional DNA segments can be ligated into the viral genome. Certain vectors are capable of autonomous replication in a host cell into which they are introduced (e.g., bacterial vectors having a bacterial origin of replication and episomal mammalian vectors). Other vectors (e.g., non-episomal mammalian vectors) are integrated into the genome of a host cell upon introduction into the host cell, and thereby are replicated along with the host genome. Moreover, certain vectors are capable of directing the expression of genes to which they are operatively-linked. Such vectors are referred to herein as “expression vectors”. In general, useful expression vectors in recombinant DNA techniques are often in the form of plasmids. In the present specification, “plasmid” and “vector” can be used interchangeably as the plasmid is the most commonly used form of vector. However, the invention is intended to include such other forms of expression vectors, such as viral vectors (e.g., replication defective retroviruses, adenoviruses and adeno-associated viruses), which serve equivalent functions.

[0194] The recombinant expression vectors of the invention comprise a nucleic acid of the invention in a form suitable for expression of the nucleic acid in a host cell, which means that the recombinant expression vectors include one or more regulatory sequences, selected on the basis of the host cells to be used for expression, that is operatively-linked to the nucleic acid sequence to be expressed. Within a recombinant expression vector, “operably-linked” is intended to mean that the nucleotide sequence of interest is linked to the regulatory sequence(s) in a manner that allows for expression of the nucleotide sequence (e.g., in an in vitro transcription/translation system or in a host cell when the vector is introduced into the host cell).

[0195] The term “regulatory sequence” is intended to includes promoters, enhancers and other expression control elements (e.g., polyadenylation signals). Such regulatory sequences are described, for example, in Goeddel, GENE EXPRESSION TECHNOLOGY: METHODS IN ENZYMOLOGY 185, Academic Press, San Diego, Calif. (1990). Regulatory sequences include those that direct constitutive expression of a nucleotide sequence in many types of host cell and those that direct expression of the nucleotide sequence only in certain host cells (e.g., tissue-specific regulatory sequences). It will be appreciated by those skilled in the art that the design of the expression vector can depend on such factors as the choice of the host cell to be transformed, the level of expression of protein desired, etc. The expression vectors of the invention can be introduced into host cells to thereby produce proteins or peptides, including fusion proteins or peptides, encoded by nucleic acids as described herein (e.g., NOVX proteins, mutant forms of NOVX proteins, fusion proteins, etc.).

[0196] The recombinant expression vectors of the invention can be designed for expression of NOVX proteins in prokaryotic or eukaryotic cells. For example, NOVX proteins can be expressed in bacterial cells such as Escherichia coli, insect cells (using baculovirus expression vectors) yeast cells or mammalian cells. Suitable host cells are discussed further in Goeddel, GENE EXPRESSION TECHNOLOGY: METHODS IN ENZYMOLOGY 185, Academic Press, San Diego, Calif. (1990). Alternatively, the recombinant expression vector can be transcribed and translated in vitro, for example using T7 promoter regulatory sequences and T7 polymerase.

[0197] Expression of proteins in prokaryotes is most often carried out in Escherichia coli with vectors containing constitutive or inducible promoters directing the expression of either fusion or non-fusion proteins. Fusion vectors add a number of amino acids to a protein encoded therein, usually to the amino terminus of the recombinant protein. Such fusion vectors typically serve three purposes: (i) to increase expression of recombinant protein; (ii) to increase the solubility of the recombinant protein; and (iii) to aid in the purification of the recombinant protein by acting as a ligand in affinity purification. Often, in fusion expression vectors, a proteolytic cleavage site is introduced at the junction of the fusion moiety and the recombinant protein to enable separation of the recombinant protein from the fusion moiety subsequent to purification of the fusion protein. Such enzymes, and their cognate recognition sequences, include Factor Xa, thrombin and enterokinase. Typical fusion expression vectors include pGEX (Pharmacia Biotech Inc; Smith and Johnson, 1988. Gene 67: 31-40), pMAL (New England Biolabs, Beverly, Mass.) and pRIT5 (Pharmacia, Piscataway, N.J.) that fuse glutathione S-transferase (GST), maltose E binding protein, or protein A, respectively, to the target recombinant protein.

[0198] Examples of suitable inducible non-fusion E. coli expression vectors include pTrc (Amrann et al., (1988) Gene 69:301-315) and pET 11d (Studier et al., GENE EXPRESSION TECHNOLOGY: METHODS IN ENZYMOLOGY 185, Academic Press, San Diego, Calif. (1990) 60-89).

[0199] One strategy to maximize recombinant protein expression in E. coli is to express the protein in a host bacteria with an impaired capacity to proteolytically cleave the recombinant protein. See, e.g., Gottesman, GENE EXPRESSION TECHNOLOGY: METHODS IN ENZYMOLOGY 185, Academic Press, San Diego, Calif. (1990) 119-128. Another strategy is to alter the nucleic acid sequence of the nucleic acid to be inserted into an expression vector so that the individual codons for each amino acid are those preferentially utilized in E. coli (see, e.g., Wada, et al., 1992. Nucl. Acids Res. 20: 2111-2118). Such alteration of nucleic acid sequences of the invention can be carried out by standard DNA synthesis techniques.

[0200] In another embodiment, the NOVX expression vector is a yeast expression vector. Examples of vectors for expression in yeast Saccharomyces cerivisae include pYepSec1 (Baldari, et al., 1987. EMBO J. 6: 229-234), pMFa (Kurjan and Herskowitz, 1982. Cell 30: 933-943), pJRY88 (Schultz et al., 1987. Gene 54: 113-123), pYES2 (Invitrogen Corporation, San Diego, Calif.), and picZ (InVitrogen Corp, San Diego, Calif.).

[0201] Alternatively, NOVX can be expressed in insect cells using baculovirus expression vectors. Baculovirus vectors available for expression of proteins in cultured insect cells (e.g., SF9 cells) include the pAc series (Smith, et al., 1983. Mol. Cell. Biol. 3: 2156-2165) and the pV_{L} series (Lucklow and Summers, 1989. Virology 170: 31-39).

[0202] In yet another embodiment, a nucleic acid of the invention is expressed in mammalian cells using a mammalian expression vector. Examples of mammalian expression vectors include pCDM8 (Seed, 1987. Nature 329: 840) and pMT2PC (Kaufman, et al., 1987. EMBO J. 6: 187-195). When used in mammalian cells, the expression vector's control functions are often provided by viral regulatory elements. For example, commonly used promoters are derived from polyoma, adenovirus 2, cytomegalovirus, and simian virus 40. For other suitable expression systems for both prokaryotic and eukaryotic cells see, e.g., Chapters 16 and 17 of Sambrook, et al., MOLECULAR CLONING: A LABORATORY MANUAL. 2nd ed., Cold Spring Harbor Laboratory, Cold Spring Harbor Laboratory Press, Cold Spring Harbor, N.Y., 1989.

[0203] In another embodiment, the recombinant mammalian expression vector is capable of directing expression of the nucleic acid preferentially in a particular cell type (e.g., tissue-specific regulatory elements are used to express the nucleic acid). Tissue-specific regulatory elements are known in the art. Non-limiting examples of suitable tissue-specific promoters include the albumin promoter (liver-specific; Pinkert, et al., 1987. Genes Dev. 1: 268-277), lymphoid-specific promoters (Calame and Eaton, 1988. Adv. Immunol. 43: 235-275), in particular promoters of T cell receptors (Winoto and Baltimore, 1989. EMBO J. 8: 729-733) and immunoglobulins (Banerji, et al., 1983. Cell 33: 729-740; Queen and Baltimore, 1983. Cell 33: 741-748), neuron-specific promoters (e.g., the neurofilament promoter; Byrne and Ruddle, 1989. Proc. Natl. Acad. Sci. USA 86: 5473-5477), pancreas-specific promoters (Edlund, et al., 1985. Science 230: 912-916), and mammary gland-specific promoters (e.g., milk whey promoter; U.S. Pat. No. 4,873,316 and European Application Publication No. 264,166). Developmentally-regulated promoters are also encompassed, e.g., the murine hox promoters (Kessel and Gruss, 1990. Science 249: 374-379) and the α-fetoprotein promoter (Campes and Tilghman, 1989. Genes Dev. 3: 537-546).

[0204] The invention further provides a recombinant expression vector comprising a DNA molecule of the invention cloned into the expression vector in an antisense orientation. That is, the DNA molecule is operatively-linked to a regulatory sequence in a manner that allows for expression (by transcription of the DNA molecule) of an RNA molecule that is antisense to NOVX mRNA. Regulatory sequences operatively linked to a nucleic acid cloned in the antisense orientation can be chosen that direct the continuous expression of the antisense RNA molecule in a variety of cell types, for instance viral promoters and/or enhancers, or regulatory sequences can be chosen that direct constitutive, tissue specific or cell type specific expression of antisense RNA. The antisense expression vector can be in the form of a recombinant plasmid, phagemid or attenuated virus in which antisense nucleic acids are produced under the control of a high efficiency regulatory region, the activity of which can be determined by the cell type into which the vector is introduced. For a discussion of the regulation of gene expression using antisense genes see, e.g., Weintraub, et al., “Antisense RNA as a molecular tool for genetic analysis,” Reviews-Trends in Genetics, Vol. 1(1) 1986.

[0205] Another aspect of the invention pertains to host cells into which a recombinant expression vector of the invention has been introduced. The terms “host cell” and “recombinant host cell” are used interchangeably herein. It is understood that such terms refer not only to the particular subject cell but also to the progeny or potential progeny of such a cell. Because certain modifications may occur in succeeding generations due to either mutation or environmental influences, such progeny may not, in fact, be identical to the parent cell, but are still included within the scope of the term as used herein.

[0206] A host cell can be any prokaryotic or eukaryotic cell. For example, NOVX protein can be expressed in bacterial cells such as E. coli, insect cells, yeast or mammalian cells (such as Chinese hamster ovary cells (CHO) or COS cells). Other suitable host cells are known to those skilled in the art.

[0207] Vector DNA can be introduced into prokaryotic or eukaryotic cells via conventional transformation or transfection techniques. As used herein, the terms “transformation” and “transfection” are intended to refer to a variety of art-recognized techniques for introducing foreign nucleic acid (e.g., DNA) into a host cell, including calcium phosphate or calcium chloride co-precipitation, DEAE-dextran-mediated transfection, lipofection, or electroporation. Suitable methods for transforming or transfecting host cells can be found in Sambrook, et al. (MOLECULAR CLONING: A LABORATORY MANUAL. 2nd ed., Cold Spring Harbor Laboratory, Cold Spring Harbor Laboratory Press, Cold Spring Harbor, N.Y., 1989), and other laboratory manuals.

[0208] For stable transfection of mammalian cells, it is known that, depending upon the expression vector and transfection technique used, only a small fraction of cells may integrate the foreign DNA into their genome. In order to identify and select these integrants, a gene that encodes a selectable marker (e.g., resistance to antibiotics) is generally introduced into the host cells along with the gene of interest. Various selectable markers include those that confer resistance to drugs, such as G418, hygromycin and methotrexate. Nucleic acid encoding a selectable marker can be introduced into a host cell on the same vector as that encoding NOVX or can be introduced on a separate vector. Cells stably transfected with the introduced nucleic acid can be identified by drug selection (e.g., cells that have incorporated the selectable marker gene will survive, while the other cells die).

[0209] A host cell of the invention, such as a prokaryotic or eukaryotic host cell in culture, can be used to produce (i.e., express) NOVX protein. Accordingly, the invention further provides methods for producing NOVX protein using the host cells of the invention. In one embodiment, the method comprises culturing the host cell of invention (into which a recombinant expression vector encoding NOVX protein has been introduced) in a suitable medium such that NOVX protein is produced. In another embodiment, the method further comprises isolating NOVX protein from the medium or the host cell.

### Transgenic NOVX Animals

[0210] The host cells of the invention can also be used to produce non-human transgenic animals. For example, in one embodiment, a host cell of the invention is a fertilized oocyte or an embryonic stem cell into which NOVX protein-coding sequences have been introduced. Such host cells can then be used to create non-human transgenic animals in which exogenous NOVX sequences have been introduced into their genome or homologous recombinant animals in which endogenous NOVX sequences have been altered. Such animals are useful for studying the function and/or activity of NOVX protein and for identifying and/or evaluating modulators of NOVX protein activity. As used herein, a “transgenic animal” is a non-human animal, preferably a mammal, more preferably a rodent such as a rat or mouse, in which one or more of the cells of the animal includes a transgene. Other examples of transgenic animals include non-human primates, sheep, dogs, cows, goats, chickens, amphibians, etc. A transgene is exogenous DNA that is integrated into the genome of a cell from which a transgenic animal develops and that remains in the genome of the mature animal, thereby directing the expression of an encoded gene product in one or more cell types or tissues of the transgenic animal. As used herein, a “homologous recombinant animal” is a non-human animal, preferably a mammal, more preferably a mouse, in which an endogenous NOVX gene has been altered by homologous recombination between the endogenous gene and an exogenous DNA molecule introduced into a cell of the animal, e.g., an embryonic cell of the animal, prior to development of the animal.

[0211] A transgenic animal of the invention can be created by introducing NOVX-encoding nucleic acid into the male pronuclei of a fertilized oocyte (e.g., by microinjection, retroviral infection) and allowing the oocyte to develop in a pseudopregnant female foster animal. The human NOVX cDNA sequences, i.e., any one of SEQ ID NOS:2n−1, wherein n is an integer between 1 and 102, can be introduced as a transgene into the genome of a non-human animal. Alternatively, a non-human homologue of the human NOVX gene, such as a mouse NOVX gene, can be isolated based on hybridization to the human NOVX cDNA (described further supra) and used as a transgene. Intronic sequences and polyadenylation signals can also be included in the transgene to increase the efficiency of expression of the transgene. A tissue-specific regulatory sequence(s) can be operably-linked to the NOVX transgene to direct expression of NOVX protein to particular cells. Methods for generating transgenic animals via embryo manipulation and microinjection, particularly animals such as mice, have become conventional in the art and are described, for example, in U.S. Pat. Nos. 4,736,866; 4,870,009; and 4,873,191; and Hogan, 1986. In: MANIPULATING THE MOUSE EMBRYO, Cold Spring Harbor Laboratory Press, Cold Spring Harbor, N.Y. Similar methods are used for production of other transgenic animals. A transgenic founder animal can be identified based upon the presence of the NOVX transgene in its genome and/or expression of NOVX mRNA in tissues or cells of the animals. A transgenic founder animal can then be used to breed additional animals carrying the transgene. Moreover, transgenic animals carrying a transgene-encoding NOVX protein can further be bred to other transgenic animals carrying other transgenes.

[0212] To create a homologous recombinant animal, a vector is prepared which contains at least a portion of a NOVX gene into which a deletion, addition or substitution has been introduced to thereby alter, e.g., functionally disrupt, the NOVX gene. The NOVX gene can be a human gene (e.g., the cDNA of any one of SEQ ID NOS:2n−1, wherein n is an integer between 1 and 102), but more preferably, is a non-human homologue of a human NOVX gene. For example, a mouse homologue of human NOVX gene of SEQ ID NOS:2n−1, wherein n is an integer between 1 and 102, can be used to construct a homologous recombination vector suitable for altering an endogenous NOVX gene in the mouse genome. In one embodiment, the vector is designed such that, upon homologous recombination, the endogenous NOVX gene is functionally disrupted (i.e., no longer encodes a functional protein; also referred to as a “knock out” vector).

[0213] Alternatively, the vector can be designed such that, upon homologous recombination, the endogenous NOVX gene is mutated or otherwise altered but still encodes functional protein (e.g., the upstream regulatory region can be altered to thereby alter the expression of the endogenous NOVX protein). In the homologous recombination vector, the altered portion of the NOVX gene is flanked at its 5′- and 3′-termini by additional nucleic acid of the NOVX gene to allow for homologous recombination to occur between the exogenous NOVX gene carried by the vector and an endogenous NOVX gene in an embryonic stem cell. The additional flanking NOVX nucleic acid is of sufficient length for successful homologous recombination with the endogenous gene. Typically, several kilobases of flanking DNA (both at the 5′- and 3′-termini) are included in the vector. See, e.g., Thomas, et al., 1987. Cell 51: 503 for a description of homologous recombination vectors. The vector is ten introduced into an embryonic stem cell line (e.g., by electroporation) and cells in which the introduced NOVX gene has homologously-recombined with the endogenous NOVX gene are selected. See, e.g., Li, et al., 1992. Cell 69: 915.

[0214] The selected cells are then injected into a blastocyst of an animal (e.g., a mouse) to form aggregation chimeras. See, e.g., Bradley, 1987. In: TERATOCARCINOMAS AND EMBRYONIC STEM CELLS: A PRACTICAL APPROACH, Robertson, ed. IRL, Oxford, pp. 113-152. A chimeric embryo can then be implanted into a suitable pseudopregnant female foster animal and the embryo brought to term. Progeny harboring the homologously-recombined DNA in their germ cells can be used to breed animals in which all cells of the animal contain the homologously-recombined DNA by germline transmission of the transgene. Methods for constructing homologous recombination vectors and homologous recombinant animals are described further in Bradley, 1991. Curr. Opin. Biotechnol. 2: 823-829; PCT International Publication Nos.: WO 90/11354; WO 91/01140; WO 92/0968; and WO 93/04169.

[0215] In another embodiment, transgenic non-humans animals can be produced that contain selected systems that allow for regulated expression of the transgene. One example of such a system is the cre/loxP recombinase system of bacteriophage P1. For a description of the cre/loxP recombinase system, See, e.g., Lakso, et al., 1992. Proc. Natl. Acad. Sci. USA 89: 6232-6236. Another example of a recombinase system is the FLP recombinase system of Saccharomyces cerevisiae. See, O'Gorman, et al., 1991. Science 251:1351-1355. If a cre/loxP recombinase system is used to regulate expression of the transgene, animals containing transgenes encoding both the Cre recombinase and a selected protein are required. Such animals can be provided through the construction of “double” transgenic animals, e.g., by mating two transgenic animals, one containing a transgene encoding a selected protein and the other containing a transgene encoding a recombinase.

[0216] Clones of the non-human transgenic animals described herein can also be produced according to the methods described in Wilmut, et al., 1997. Nature 385: 810-813. In brief, a cell (e.g., a somatic cell) from the transgenic animal can be isolated and induced to exit the growth cycle and enter G₀ phase. The quiescent cell can then be fused, e.g., through the use of electrical pulses, to an enucleated oocyte from an animal of the same species from which the quiescent cell is isolated. The reconstructed oocyte is then cultured such that it develops to morula or blastocyte and then transferred to pseudopregnant female foster animal. The offspring borne of this female foster animal will be a clone of the animal from which the cell (e.g., the somatic cell) is isolated.

### Pharmaceutical Compositions

[0217] The NOVX nucleic acid molecules, NOVX proteins, and anti-NOVX antibodies (also referred to herein as “active compounds”) of the invention, and derivatives, fragments, analogs and homologs thereof, can be incorporated into pharmaceutical compositions suitable for administration. Such compositions typically comprise the nucleic acid molecule, protein, or antibody and a pharmaceutically acceptable carrier. As used herein, “pharmaceutically acceptable carrier” is intended to include any and all solvents, dispersion media, coatings, antibacterial and antifungal agents, isotonic and absorption delaying agents, and the like, compatible with pharmaceutical administration. Suitable carriers are described in the most recent edition of Remington's Pharmaceutical Sciences, a standard reference text in the field, which is incorporated herein by reference. Preferred examples of such carriers or diluents include, but are not limited to, water, saline, finger's solutions, dextrose solution, and 5% human serum albumin. Liposomes and non-aqueous vehicles such as fixed oils may also be used. The use of such media and agents for pharmaceutically active substances is well known in the art. Except insofar as any conventional media or agent is incompatible with the active compound, use thereof in the compositions is contemplated. Supplementary active compounds can also be incorporated into the compositions.

[0218] A pharmaceutical composition of the invention is formulated to be compatible with its intended route of administration. Examples of routes of administration include parenteral, e.g., intravenous, intradermal, subcutaneous, oral (e.g., inhalation), transdermal (i.e., topical), transmucosal, and rectal administration. Solutions or suspensions used for parenteral, intradermal, or subcutaneous application can include the following components: a sterile diluent such as water for injection, saline solution, fixed oils, polyethylene glycols, glycerine, propylene glycol or other synthetic solvents; antibacterial agents such as benzyl alcohol or methyl parabens; antioxidants such as ascorbic acid or sodium bisulfite; chelating agents such as ethylenediaminetetraacetic acid (EDTA); buffers such as acetates, citrates or phosphates, and agents for the adjustment of tonicity such as sodium chloride or dextrose. The pH can be adjusted with acids or bases, such as hydrochloric acid or sodium hydroxide. The parenteral preparation can be enclosed in ampoules, disposable syringes or multiple dose vials made of glass or plastic.

[0219] Pharmaceutical compositions suitable for injectable use include sterile aqueous solutions (where water soluble) or dispersions and sterile powders for the extemporaneous preparation of sterile injectable solutions or dispersion. For intravenous administration, suitable carriers include physiological saline, bacteriostatic water, Cremophor EL™ (BASF, Parsippany, N.J.) or phosphate buffered saline (PBS). In all cases, the composition must be sterile and should be fluid to the extent that easy syringeability exists. It must be stable under the conditions of manufacture and storage and must be preserved against the contaminating action of microorganisms such as bacteria and fungi. The carrier can be a solvent or dispersion medium containing, for example, water, ethanol, polyol (for example, glycerol, propylene glycol, and liquid polyethylene glycol, and the like), and suitable mixtures thereof. The proper fluidity can be maintained, for example, by the use of a coating such as lecithin, by the maintenance of the required particle size in the case of dispersion and by the use of surfactants. Prevention of the action of microorganisms can be achieved by various antibacterial and antifungal agents, for example, parabens, chlorobutanol, phenol, ascorbic acid, thimerosal, and the like. In many cases, it will be preferable to include isotonic agents, for example, sugars, polyalcohols such as manitol, sorbitol, sodium chloride in the composition. Prolonged absorption of the injectable compositions can be brought about by including in the composition an agent which delays absorption, for example, aluminum monostearate and gelatin.

[0220] Sterile injectable solutions can be prepared by incorporating the active compound (e.g., a NOVX protein or anti-NOVX antibody) in the required amount in an appropriate solvent with one or a combination of ingredients enumerated above, as required, followed by filtered sterilization. Generally, dispersions are prepared by incorporating the active compound into a sterile vehicle that contains a basic dispersion medium and the required other ingredients from those enumerated above. In the case of sterile powders for the preparation of sterile injectable solutions, methods of preparation are vacuum drying and freeze-drying that yields a powder of the active ingredient plus any additional desired ingredient from a previously sterile-filtered solution thereof.

[0221] Oral compositions generally include an inert diluent or an edible carrier. They can be enclosed in gelatin capsules or compressed into tablets. For the purpose of oral therapeutic administration, the active compound can be incorporated with excipients and used in the form of tablets, troches, or capsules. Oral compositions can also be prepared using a fluid carrier for use as a mouthwash, wherein the compound in the fluid carrier is applied orally and swished and expectorated or swallowed. Pharmaceutically compatible binding agents, and/or adjuvant materials can be included as part of the composition. The tablets, pills, capsules, troches and the like can contain any of the following ingredients, or compounds of a similar nature: a binder such as microcrystalline cellulose, gum tragacanth or gelatin; an excipient such as starch or lactose, a disintegrating agent such as alginic acid, Primogel, or corn starch; a lubricant such as magnesium stearate or Sterotes; a glidant such as colloidal silicon dioxide; a sweetening agent such as sucrose or saccharin; or a flavoring agent such as peppermint, methyl salicylate, or orange flavoring.

[0222] For administration by inhalation, the compounds are delivered in the form of an aerosol spray from pressured container or dispenser which contains a suitable propellant, e.g., a gas such as carbon dioxide, or a nebulizer.

[0223] Systemic administration can also be by transmucosal or transdermal means. For transmucosal or transdermal administration, penetrants appropriate to the barrier to be permeated are used in the formulation. Such penetrants are generally known in the art, and include, for example, for transmucosal administration, detergents, bile salts, and fusidic acid derivatives. Transmucosal administration can be accomplished through the use of nasal sprays or suppositories. For transdermal administration, the active compounds are formulated into ointments, salves, gels, or creams as generally known in the art.

[0224] The compounds can also be prepared in the form of suppositories (e.g., with conventional suppository bases such as cocoa butter and other glycerides) or retention enemas for rectal delivery.

[0225] In one embodiment, the active compounds are prepared with carriers that will protect the compound against rapid elimination from the body, such as a controlled release formulation, including implants and microencapsulated delivery systems. Biodegradable, biocompatible polymers can be used, such as ethylene vinyl acetate, polyanhydrides, polyglycolic acid, collagen, polyorthoesters, and polylactic acid. Methods for preparation of such formulations will be apparent to those skilled in the art. The materials can also be obtained commercially from Alza Corporation and Nova Pharmaceuticals, Inc. Liposomal suspensions (including liposomes targeted to infected cells with monoclonal antibodies to viral antigens) can also be used as pharmaceutically acceptable carriers. These can be prepared according to methods known to those skilled in the art, for example, as described in U.S. Pat. No. 4,522,811.

[0226] It is especially advantageous to formulate oral or parenteral compositions in dosage unit form for ease of administration and uniformity of dosage. Dosage unit form as used herein refers to physically discrete units suited as unitary dosages for the subject to be treated; each unit containing a predetermined quantity of active compound calculated to produce the desired therapeutic effect in association with the required pharmaceutical carrier. The specification for the dosage unit forms of the invention are dictated by and directly dependent on the unique characteristics of the active compound and the particular therapeutic effect to be achieved, and the limitations inherent in the art of compounding such an active compound for the treatment of individuals.

[0227] The nucleic acid molecules of the invention can be inserted into vectors and used as gene therapy vectors. Gene therapy vectors can be delivered to a subject by, for example, intravenous injection, local administration (see, e.g., U.S. Pat. No. 5,328,470) or by stereotactic injection (see, e.g., Chen, et al., 1994. Proc. Natl. Acad. Sci. USA 91: 3054-3057). The pharmaceutical preparation of the gene therapy vector can include the gene therapy vector in an acceptable diluent, or can comprise a slow release matrix in which the gene delivery vehicle is imbedded. Alternatively, where the complete gene delivery vector can be produced intact from recombinant cells, e.g., retroviral vectors, the pharmaceutical preparation can include one or more cells that produce the gene delivery system.

[0228] The pharmaceutical compositions can be included in a container, pack, or dispenser together with instructions for administration.

### Screening and Detection Methods

[0229] The isolated nucleic acid molecules of the invention can be used to express NOVX protein (e.g., via a recombinant expression vector in a host cell in gene therapy applications), to detect NOVX mRNA (e.g., in a biological sample) or a genetic lesion in a NOVX gene, and to modulate NOVX activity, as described further, below. In addition, the NOVX proteins can be used to screen drugs or compounds that modulate the NOVX protein activity or expression as well as to treat disorders characterized by insufficient or excessive production of NOVX protein or production of NOVX protein forms that have decreased or aberrant activity compared to NOVX wild-type protein (e.g.; diabetes (regulates insulin release); obesity (binds and transport lipids); metabolic disturbances associated with obesity, the metabolic syndrome X as well as anorexia and wasting disorders associated with chronic diseases and various cancers, and infectious disease(possesses anti-microbial activity) and the various dyslipidemias. In addition, the anti-NOVX antibodies of the invention can be used to detect and isolate NOVX proteins and modulate NOVX activity. In yet a further aspect, the invention can be used in methods to influence appetite, absorption of nutrients and the disposition of metabolic substrates in both a positive and negative fashion.

[0230] The invention further pertains to novel agents identified by the screening assays described herein and uses thereof for treatments as described, supra.

### Screening Assays

[0231] The invention provides a method (also referred to herein as a “screening assay”) for identifying modulators, i.e., candidate or test compounds or agents (e.g., peptides, peptidomimetics, small molecules or other drugs) that bind to NOVX proteins or have a stimulatory or inhibitory effect on, e.g., NOVX protein expression or NOVX protein activity. The invention also includes compounds identified in the screening assays described herein.

[0232] In one embodiment, the invention provides assays for screening candidate or test compounds which bind to or modulate the activity of the membrane-bound form of a NOVX protein or polypeptide or biologically-active portion thereof. The test compounds of the invention can be obtained using any of the numerous approaches in combinatorial library methods known in the art, including: biological libraries; spatially addressable parallel solid phase or solution phase libraries; synthetic library methods requiring deconvolution; the “one-bead one-compound” library method; and synthetic library methods using affinity chromatography selection. The biological library approach is limited to peptide libraries, while the other four approaches are applicable to peptide, non-peptide oligomer or small molecule libraries of compounds. See, e.g., Lam, 1997. Anticancer Drug Design 12: 145.

[0233] A “small molecule” as used herein, is meant to refer to a composition that has a molecular weight of less than about 5 kD and most preferably less than about 4 kD. Small molecules can be, e.g., nucleic acids, peptides, polypeptides, peptidomimetics, carbohydrates, lipids or other organic or inorganic molecules. Libraries of chemical and/or biological mixtures, such as fungal, bacterial, or algal extracts, are known in the art and can be screened with any of the assays of the invention.

[0234] Examples of methods for the synthesis of molecular libraries can be found in the art, for example in: DeWitt, et al., 1993. Proc. Natl. Acad. Sci. U.S.A. 90: 6909; Erb, et al., 1994. Proc. Natl. Acad. Sci. U.S.A. 91: 11422; Zuckermann, et al., 1994. J. Med. Chem. 37: 2678; Cho, et al., 1993. Science 261: 1303; Carrell, et al., 1994. Angew. Chem. Int. Ed. Engl. 33: 2059; Carell, et al., 1994. Angew. Chem. Int. Ed. Engl. 33: 2061; and Gallop, et al., 1994. J. Med. Chem. 37: 1233.

[0235] Libraries of compounds may be presented in solution (e.g., Houghten, 1992. Biotechniques 13: 412-421), or on beads (Lam, 1991. Nature 354: 82-84), on chips (Fodor, 1993. Nature 364: 555-556), bacteria (Ladner, U.S. Pat. No. 5,223,409), spores (Ladner, U.S. Pat. No. 5,233,409), plasmids (Cull, et al., 1992. Proc. Natl. Acad. Sci. USA 89: 1865-1869) or on phage (Scott and Smith, 1990. Science 249: 386-390; Devlin, 1990. Science 249: 404-406; Cwirla, et al., 1990. Proc. Natl. Acad. Sci. U.S.A. 87: 6378-6382; Felici, 1991. J. Mol. Biol. 222: 301-310; Ladner, U.S. Pat. No. 5,233,409.).

[0236] In one embodiment, an assay is a cell-based assay in which a cell which expresses a membrane-bound form of NOVX protein, or a biologically-active portion thereof, on the cell surface is contacted with a test compound and the ability of the test compound to bind to a NOVX protein determined. The cell, for example, can of mammalian origin or a yeast cell. Determining the ability of the test compound to bind to the NOVX protein can be accomplished, for example, by coupling the test compound with a radioisotope or enzymatic label such that binding of the test compound to the NOVX protein or biologically-active portion thereof can be determined by detecting the labeled compound in a complex. For example, test compounds can be labeled with 125I, 35S, ¹⁴C, or ³H, either directly or indirectly, and the radioisotope detected by direct counting of radioemission or by scintillation counting. Alternatively, test compounds can be enzymatically-labeled with, for example, horseradish peroxidase, alkaline phosphatase, or luciferase, and the enzymatic label detected by determination of conversion of an appropriate substrate to product. In one embodiment, the assay comprises contacting a cell which expresses a membrane-bound form of NOVX protein, or a biologically-active portion thereof, on the cell surface with a known compound which binds NOVX to form an assay mixture, contacting the assay mixture with a test compound, and determining the ability of the test compound to interact with a NOVX protein, wherein determining the ability of the test compound to interact with a NOVX protein comprises determining the ability of the test compound to preferentially bind to NOVX protein or a biologically-active portion thereof as compared to the known compound.

[0237] In another embodiment, an assay is a cell-based assay comprising contacting a cell expressing a membrane-bound form of NOVX protein, or a biologically-active portion thereof, on the cell surface with a test compound and determining the ability of the test compound to modulate (e.g., stimulate or inhibit) the activity of the NOVX protein or biologically-active portion thereof. Determining the ability of the test compound to modulate the activity of NOVX or a biologically-active portion thereof can be accomplished, for example, by determining the ability of the NOVX protein to bind to or interact with a NOVX target molecule. As used herein, a “target molecule” is a molecule with which a NOVX protein binds or interacts in nature, for example, a molecule on the surface of a cell which expresses a NOVX interacting protein, a molecule on the surface of a second cell, a molecule in the extracellular milieu, a molecule associated with the internal surface of a cell membrane or a cytoplasmic molecule a NOVX target molecule can be a non-NOVX molecule or a NOVX protein or polypeptide of the invention. In one embodiment, a NOVX target molecule is a component of a signal transduction pathway that facilitates transduction of an extracellular signal (e.g. a signal generated by binding of a compound to a membrane-bound NOVX molecule) through the cell membrane and into the cell. The target, for example, can be a second intercellular protein that has catalytic activity or a protein that facilitates the association of downstream signaling molecules with NOVX.

[0238] Determining the ability of the NOVX protein to bind to or interact with a NOVX target molecule can be accomplished by one of the methods described above for determining direct binding. In one embodiment, determining the ability of the NOVX protein to bind to or interact with a NOVX target molecule can be accomplished by determining the activity of the target molecule. For example, the activity of the target molecule can be determined by detecting induction of a cellular second messenger of the target (i.e. intracellular Ca²⁺, diacylglycerol, IP₃, etc.), detecting catalytic/enzymatic activity of the target an appropriate substrate, detecting the induction of a reporter gene (comprising a NOVX-responsive regulatory element operatively linked to a nucleic acid encoding a detectable marker, e.g., luciferase), or detecting a cellular response, for example, cell survival, cellular differentiation, or cell proliferation.

[0239] In yet another embodiment, an assay of the invention is a cell-free assay comprising contacting a NOVX protein or biologically-active portion thereof with a test compound and determining the ability of the test compound to bind to the NOVX protein or biologically-active portion thereof. Binding of the test compound to the NOVX protein can be determined either directly or indirectly as described above. In one such embodiment, the assay comprises contacting the NOVX protein or biologically-active portion thereof with a known compound which binds NOVX to form an assay mixture, contacting the assay mixture with a test compound, and determining the ability of the test compound to interact with a NOVX protein, wherein determining the ability of the test compound to interact with a NOVX protein comprises determining the ability of the test compound to preferentially bind to NOVX or biologically-active portion thereof as compared to the known compound.

[0240] In still another embodiment, an assay is a cell-free assay comprising contacting NOVX protein or biologically-active portion thereof with a test compound and determining the ability of the test compound to modulate (e.g. stimulate or inhibit) the activity of the NOVX protein or biologically-active portion thereof. Determining the ability of the test compound to modulate the activity of NOVX can be accomplished, for example, by determining the ability of the NOVX protein to bind to a NOVX target molecule by one of the methods described above for determining direct binding. In an alternative embodiment, determining the ability of the test compound to modulate the activity of NOVX protein can be accomplished by determining the ability of the NOVX protein further modulate a NOVX target molecule. For example, the catalytic/enzymatic activity of the target molecule on an appropriate substrate can be determined as described, supra.

[0241] In yet another embodiment, the cell-free assay comprises contacting the NOVX protein or biologically-active portion thereof with a known compound which binds NOVX protein to form an assay mixture, contacting the assay mixture with a test compound, and determining the ability of the test compound to interact with a NOVX protein, wherein determining the ability of the test compound to interact with a NOVX protein comprises determining the ability of the NOVX protein to preferentially bind to or modulate the activity of a NOVX target molecule.

[0242] The cell-free assays of the invention are amenable to use of both the soluble form or the membrane-bound form of NOVX protein. In the case of cell-free assays comprising the membrane-bound form of NOVX protein, it may be desirable to utilize a solubilizing agent such that the membrane-bound form of NOVX protein is maintained in solution. Examples of such solubilizing agents include non-ionic detergents such as n-octylglucoside, n-dodecylglucoside, n-dodecylmaltoside, octanoyl-N-methylglucamide, decanoyl-N-methylglucamide, Triton® X-100, Triton® X-1 14, Thesit®, Isotridecypoly(ethylene glycol ether)ₙ, N-dodecyl-N,N-dimethyl-3-ammonio-1-propane sulfonate, 3-(3-cholamidopropyl) dimethylamminiol-1-propane sulfonate (CHAPS), or 3-(3-cholamidopropyl)dimethylamminiol-2-hydroxy-1-propane sulfonate (CHAPSO).

[0243] In more than one embodiment of the above assay methods of the invention, it may be desirable to immobilize either NOVX protein or its target molecule to facilitate separation of complexed from uncomplexed forms of one or both of the proteins, as well as to accommodate automation of the assay. Binding of a test compound to NOVX protein, or interaction of NOVX protein with a target molecule in the presence and absence of a candidate compound, can be accomplished in any vessel suitable for containing the reactants. Examples of such vessels include microtiter plates, test tubes, and micro-centrifuge tubes. In one embodiment, a fusion protein can be provided that adds a domain that allows one or both of the proteins to be bound to a matrix. For example, GST-NOVX fusion proteins or GST-target fusion proteins can be adsorbed onto glutathione sepharose beads (Sigma Chemical, St. Louis, Mo.) or glutathione derivatized microtiter plates, that are then combined with the test compound or the test compound and either the non-adsorbed target protein or NOVX protein, and the mixture is incubated under conditions conducive to complex formation (e.g., at physiological conditions for salt and pH). Following incubation, the beads or microtiter plate wells are washed to remove any unbound components, the matrix immobilized in the case of beads, complex determined either directly or indirectly, for example, as described, supra. Alternatively, the complexes can be dissociated from the matrix, and the level of NOVX protein binding or activity determined using standard techniques.

[0244] Other techniques for immobilizing proteins on matrices can also be used in the screening assays of the invention. For example, either the NOVX protein or its target molecule can be immobilized utilizing conjugation of biotin and streptavidin. Biotinylated NOVX protein or target molecules can be prepared from biotin-NHS (N-hydroxy-succinimide) using techniques well-known within the art (e.g., biotinylation kit, Pierce Chemicals, Rockford, Ill.), and immobilized in the wells of streptavidin-coated 96 well plates (Pierce Chemical). Alternatively, antibodies reactive with NOVX protein or target molecules, but which do not interfere with binding of the NOVX protein to its target molecule, can be derivatized to the wells of the plate, and unbound target or NOVX protein trapped in the wells by antibody conjugation. Methods for detecting such complexes, in addition to those described above for the GST-immobilized complexes, include immunodetection of complexes using antibodies reactive with the NOVX protein or target molecule, as well as enzyme-linked assays that rely on detecting an enzymatic activity associated with the NOVX protein or target molecule.

[0245] In another embodiment, modulators of NOVX protein expression are identified in a method wherein a cell is contacted with a candidate compound and the expression of NOVX mRNA or protein in the cell is determined. The level of expression of NOVX mRNA or protein in the presence of the candidate compound is compared to the level of expression of NOVX mRNA or protein in the absence of the candidate compound. The candidate compound can then be identified as a modulator of NOVX mRNA or protein expression based upon this comparison. For example, when expression of NOVX mRNA or protein is greater (i.e., statistically significantly greater) in the presence of the candidate compound than in its absence, the candidate compound is identified as a stimulator of NOVX mRNA or protein expression. Alternatively, when expression of NOVX mRNA or protein is less (statistically significantly less) in the presence of the candidate compound than in its absence, the candidate compound is identified as an inhibitor of NOVX mRNA or protein expression. The level of NOVX mRNA or protein expression in the cells can be determined by methods described herein for detecting NOVX mRNA or protein.

[0246] In yet another aspect of the invention, the NOVX proteins can be used as “bait proteins” in a two-hybrid assay or three hybrid assay (see, e.g., U.S. Pat. No. 5,283,317; Zervos, et al., 1993. Cell 72: 223-232; Madura, et al., 1993. J. Biol. Chem. 268: 12046-12054; Bartel, et al., 1993. Biotechniques 14: 920-924; Iwabuchi, et al., 1993. Oncogene 8: 1693-1696; and Brent WO 94/10300), to identify other proteins that bind to or interact with NOVX (“NOVX-binding proteins” or “NOVX-bp”) and modulate NOVX activity. Such NOVX-binding proteins are also likely to be involved in the propagation of signals by the NOVX proteins as, for example, upstream or downstream elements of the NOVX pathway.

[0247] The two-hybrid system is based on the modular nature of most transcription factors, which consist of separable DNA-binding and activation domains. Briefly, the assay utilizes two different DNA constructs. In one construct, the gene that codes for NOVX is fused to a gene encoding the DNA binding domain of a known transcription factor (e.g., GAL-4). In the other construct, a DNA sequence, from a library of DNA sequences, that encodes an unidentified protein (“prey” or “sample”) is fused to a gene that codes for the activation domain of the known transcription factor. If the “bait” and the “prey” proteins are able to interact, in vivo, forming a NOVX-dependent complex, the DNA-binding and activation domains of the transcription factor are brought into close proximity. This proximity allows transcription of a reporter gene (e.g., LacZ) that is operably linked to a transcriptional regulatory site responsive to the transcription factor. Expression of the reporter gene can be detected and cell colonies containing the functional transcription factor can be isolated and used to obtain the cloned gene that encodes the protein which interacts with NOVX.

[0248] The invention further pertains to novel agents identified by the aforementioned screening assays and uses thereof for treatments as described herein.

### Detection Assays

[0249] Portions or fragments of the cDNA sequences identified herein (and the corresponding complete gene sequences) can be used in numerous ways as polynucleotide reagents. By way of example, and not of limitation, these sequences can be used to: (i) map their respective genes on a chromosome; and, thus, locate gene regions associated with genetic disease; (ii) identify an individual from a minute biological sample (tissue typing); and (iii) aid in forensic identification of a biological sample. Some of these applications are described in the subsections, below.

### Chromosome Mapping

[0250] Once the sequence (or a portion of the sequence) of a gene has been isolated, this sequence can be used to map the location of the gene on a chromosome. This process is called chromosome mapping. Accordingly, portions or fragments of a NOVX sequence, i.e., of SEQ ID NOS:2n−1, wherein n is an integer between 1 and 102, or fragments or derivatives thereof, can be used to map the location of the NOVX genes, respectively, on a chromosome. The mapping of the NOVX sequences to chromosomes is an important first step in correlating these sequences with genes associated with disease.

[0251] Briefly, NOVX genes can be mapped to chromosomes by preparing PCR primers (preferably 15-25 bp in length) from the NOVX sequences. Computer analysis of the NOVX, sequences can be used to rapidly select primers that do not span more than one exon in the genomic DNA, thus complicating the amplification process. These primers can then be used for PCR screening of somatic cell hybrids containing individual human chromosomes. Only those hybrids containing the human gene corresponding to the NOVX sequences will yield an amplified fragment.

[0252] Somatic cell hybrids are prepared by fusing somatic cells from different mammals (e.g., human and mouse cells). As hybrids of human and mouse cells grow and divide, they gradually lose human chromosomes in random order, but retain the mouse chromosomes. By using media in which mouse cells cannot grow, because they lack a particular enzyme, but in which human cells can, the one human chromosome that contains the gene encoding the needed enzyme will be retained. By using various media, panels of hybrid cell lines can be established. Each cell line in a panel contains either a single human chromosome or a small number of human chromosomes, and a full set of mouse chromosomes, allowing easy mapping of individual genes to specific human chromosomes. See, e.g., D'Eustachio, et al., 1983. Science 220: 919-924. Somatic cell hybrids containing only fragments of human chromosomes can also be produced by using human chromosomes with translocations and deletions.

[0253] PCR mapping of somatic cell hybrids is a rapid procedure for assigning a particular sequence to a particular chromosome. Three or more sequences can be assigned per day using a single thermal cycler. Using the NOVX sequences to design oligonucleotide primers, sub-localization can be achieved with panels of fragments from specific chromosomes.

[0254] Fluorescence in situ hybridization (FISH) of a DNA sequence to a metaphase chromosomal spread can further be used to provide a precise chromosomal location in one step. Chromosome spreads can be made using cells whose division has been blocked in metaphase by a chemical like colcemid that disrupts the mitotic spindle. The chromosomes can be treated briefly with trypsin, and then stained with Giemsa. A pattern of light and dark bands develops on each chromosome, so that the chromosomes can be identified individually. The FISH technique can be used with a DNA sequence as short as 500 or 600 bases. However, clones larger than 1,000 bases have a higher likelihood of binding to a unique chromosomal location with sufficient signal intensity for simple detection. Preferably 1,000 bases, and more preferably 2,000 bases, will suffice to get good results at a reasonable amount of time. For a review of this technique, see, Verma, et al., HUMAN CHROMOSOMES: A MANUAL OF BASIC TECHNIQUES (Pergamon Press, New York 1988).

[0255] Reagents for chromosome mapping can be used individually to mark a single chromosome or a single site on that chromosome, or panels of reagents can be used for marking multiple sites and/or multiple chromosomes. Reagents corresponding to noncoding regions of the genes actually are preferred for mapping purposes. Coding sequences are more likely to be conserved within gene families, thus increasing the chance of cross hybridizations during chromosomal mapping.

[0256] Once a sequence has been mapped to a precise chromosomal location, the physical position of the sequence on the chromosome can be correlated with genetic map data. Such data are found, e.g., in McKusick, MENDELIAN INHERITANCE IN MAN, available on-line through Johns Hopkins University Welch Medical Library). The relationship between genes and disease, mapped to the same chromosomal region, can then be identified through linkage analysis (co-inheritance of physically adjacent genes), described in, e.g., Egeland, et al., 1987. Nature, 325: 783-787.

[0257] Moreover, differences in the DNA sequences between individuals affected and unaffected with a disease associated with the NOVX gene, can be determined. If a mutation is observed in some or all of the affected individuals but not in any unaffected individuals, then the mutation is likely to be the causative agent of the particular disease. Comparison of affected and unaffected individuals generally involves first looking for structural alterations in the chromosomes, such as deletions or translocations that are visible from chromosome spreads or detectable using PCR based on that DNA sequence. Ultimately, complete sequencing of genes from several individuals can be performed to confirm the presence of a mutation and to distinguish mutations from polymorphisms.

### Tissue Typing

[0258] The NOVX sequences of the invention can also be used to identify individuals from minute biological samples. In this technique, an individual's genomic DNA is digested with one or more restriction enzymes, and probed on a Southern blot to yield unique bands for identification. The sequences of the invention are useful as additional DNA markers for RFLP (“restriction fragment length polymorphisms,” described in U.S. Pat. No. 5,272,057).

[0259] Furthermore, the sequences of the invention can be used to provide an alternative technique that determines the actual base-by-base DNA sequence of selected portions of an individual's genome. Thus, the NOVX sequences described herein can be used to prepare two PCR primers from the 5′- and 3′-termini of the sequences. These primers can then be used to amplify an individual's DNA and subsequently sequence it.

[0260] Panels of corresponding DNA sequences from individuals, prepared in this manner, can provide unique individual identifications, as each individual will have a unique set of such DNA sequences due to allelic differences. The sequences of the invention can be used to obtain such identification sequences from individuals and from tissue. The NOVX sequences of the invention uniquely represent portions of the human genome. Allelic variation occurs to some degree in the coding regions of these sequences, and to a greater degree in the noncoding regions. It is estimated that allelic variation between individual humans occurs with a frequency of about once per each 500 bases. Much of the allelic variation is due to single nucleotide polymorphisms (SNPs), which include restriction fragment length polymorphisms (RFLPs).

[0261] Each of the sequences described herein can, to some degree, be used as a standard against which DNA from an individual can be compared for identification purposes. Because greater numbers of polymorphisms occur in the noncoding regions, fewer sequences are necessary to differentiate individuals. The noncoding sequences can comfortably provide positive individual identification with a panel of perhaps 10 to 1,000 primers that each yield a noncoding amplified sequence of 100 bases. If coding sequences, such as those of SEQ ID NOS:2n−1, wherein n is an integer between 1 and 102, are used, a more appropriate number of primers for positive individual identification would be 500-2,000.

### Predictive Medicine

[0262] The invention also pertains to the field of predictive medicine in which diagnostic assays, prognostic assays, pharmacogenomics, and monitoring clinical trials are used for prognostic (predictive) purposes to thereby treat an individual prophylactically. Accordingly, one aspect of the invention relates to diagnostic assays for determining NOVX protein and/or nucleic acid expression as well as NOVX activity, in the context of a biological sample (e.g., blood, serum, cells, tissue) to thereby determine whether an individual is afflicted with a disease or disorder, or is at risk of developing a disorder, associated with aberrant NOVX expression or activity. The disorders include metabolic disorders, diabetes, obesity, infectious disease, anorexia, cancer-associated cachexia, cancer, neurodegenerative disorders, Alzheimer's Disease, Parkinson's Disorder, immune disorders, and hematopoietic disorders, and the various dyslipidemias, metabolic disturbances associated with obesity, the metabolic syndrome X and wasting disorders associated with chronic diseases and various cancers. The invention also provides for prognostic (or predictive) assays for determining whether an individual is at risk of developing a disorder associated with NOVX protein, nucleic acid expression or activity. For example, mutations in a NOVX gene can be assayed in a biological sample. Such assays can be used for prognostic or predictive purpose to thereby prophylactically treat an individual prior to the onset of a disorder characterized by or associated with NOVX protein, nucleic acid expression, or biological activity.

[0263] Another aspect of the invention provides methods for determining NOVX protein, nucleic acid expression or activity in an individual to thereby select appropriate therapeutic or prophylactic agents for that individual (referred to herein as “pharmacogenomics”). Pharmacogenomics allows for the selection of agents (e.g., drugs) for therapeutic or prophylactic treatment of an individual based on the genotype of the individual (e.g., the genotype of the individual examined to determine the ability of the individual to respond to a particular agent.) Yet another aspect of the invention pertains to monitoring the influence of agents (e.g., drugs, compounds) on the expression or activity of NOVX in clinical trials. These and other agents are described in further detail in the following sections.

### Diagnostic Assays

[0264] An exemplary method for detecting the presence or absence of NOVX in a biological sample involves obtaining a biological sample from a test subject and contacting the biological sample with a compound or an agent capable of detecting NOVX protein or nucleic acid (e.g., mRNA, genomic DNA) that encodes NOVX protein such that the presence of NOVX is detected in the biological sample. An agent for detecting NOVX mRNA or genomic DNA is a labeled nucleic acid probe capable of hybridizing to NOVX mRNA or genomic DNA. The nucleic acid probe can be, for example, a full-length NOVX nucleic acid, such as the nucleic acid of SEQ ID NOS:2n−1, wherein n is an integer between 1 and 102, or a portion thereof, such as an oligonucleotide of at least 15, 30, 50, 100, 250 or 500 nucleotides in length and sufficient to specifically hybridize under stringent conditions to NOVX mRNA or genomic DNA. Other suitable probes for use in the diagnostic assays of the invention are described herein.

[0265] An agent for detecting NOVX protein is an antibody capable of binding to NOVX protein, preferably an antibody with a detectable label. Antibodies can be polyclonal, or more preferably, monoclonal. An intact antibody, or a fragment thereof (e.g., F_{ab} or F(ab′)₂) can be used. The term “labeled”, with regard to the probe or antibody, is intended to encompass direct labeling of the probe or antibody by coupling (i.e., physically linking) a detectable substance to the probe or antibody, as well as indirect labeling of the probe or antibody by reactivity with another reagent that is directly labeled. Examples of indirect labeling include detection of a primary antibody using a fluorescently-labeled secondary antibody and end-labeling of a DNA probe with biotin such that it can be detected with fluorescently-labeled streptavidin. The term “biological sample” is intended to include tissues, cells and biological fluids isolated from a subject, as well as tissues, cells and fluids present within a subject. That is, the detection method of the invention can be used to detect NOVX mRNA, protein, or genomic DNA in a biological sample in vitro as well as in vivo. For example, in vitro techniques for detection of NOVX mRNA include Northern hybridizations and in situ hybridizations. In vitro techniques for detection of NOVX protein include enzyme linked immunosorbent assays (ELISAs), Western blots, immunoprecipitations, and immunofluorescence. In vitro techniques for detection of NOVX genomic DNA include Southern hybridizations. Furthermore, in vivo techniques for detection of NOVX protein include introducing into a subject a labeled anti-NOVX antibody. For example, the antibody can be labeled with a radioactive marker whose presence and location in a subject can be detected by standard imaging techniques.

[0266] In one embodiment, the biological sample contains protein molecules from the test subject. Alternatively, the biological sample can contain mRNA molecules from the test subject or genomic DNA molecules from the test subject. A preferred biological sample is a peripheral blood leukocyte sample isolated by conventional means from a subject.

[0267] In another embodiment, the methods further involve obtaining a control biological sample from a control subject, contacting the control sample with a compound or agent capable of detecting NOVX protein, mRNA, or genomic DNA, such that the presence of NOVX protein, mRNA or genomic DNA is detected in the biological sample, and comparing the presence of NOVX protein, mRNA or genomic DNA in the control sample with the presence of NOVX protein, mRNA or genomic DNA in the test sample.

[0268] The invention also encompasses kits for detecting the presence of NOVX in a biological sample. For example, the kit can comprise: a labeled compound or agent capable of detecting NOVX protein or mRNA in a biological sample; means for determining the amount of NOVX in the sample; and means for comparing the amount of NOVX in the sample with a standard. The compound or agent can be packaged in a suitable container. The kit can further comprise instructions for using the kit to detect NOVX protein or nucleic acid.

### Prognostic Assays

[0269] The diagnostic methods described herein can furthermore be utilized to identify subjects having or at risk of developing a disease or disorder associated with aberrant NOVX expression or activity. For example, the assays described herein, such as the preceding diagnostic assays or the following assays, can be utilized to identify a subject having or at risk of developing a disorder associated with NOVX protein, nucleic acid expression or activity. Alternatively, the prognostic assays can be utilized to identify a subject having or at risk for developing a disease or disorder. Thus, the invention provides a method for identifying a disease or disorder associated with aberrant NOVX expression or activity in which a test sample is obtained from a subject and NOVX protein or nucleic acid (e.g., mRNA, genomic DNA) is detected, wherein the presence of NOVX protein or nucleic acid is diagnostic for a subject having or at risk of developing a disease or disorder associated with aberrant NOVX expression or activity. As used herein, a “test sample” refers to a biological sample obtained from a subject of interest. For example, a test sample can be a biological fluid (e.g., serum), cell sample, or tissue.

[0270] Furthermore, the prognostic assays described herein can be used to determine whether a subject can be administered an agent (e.g., an agonist, antagonist, peptidomimetic, protein, peptide, nucleic acid, small molecule, or other drug candidate) to treat a disease or disorder associated with aberrant NOVX expression or activity. For example, such methods can be used to determine whether a subject can be effectively treated with an agent for a disorder. Thus, the invention provides methods for determining whether a subject can be effectively treated with an agent for a disorder associated with aberrant NOVX expression or activity in which a test sample is obtained and NOVX protein or nucleic acid is detected (e.g., wherein the presence of NOVX protein or nucleic acid is diagnostic for a subject that can be administered the agent to treat a disorder associated with aberrant NOVX expression or activity).

[0271] The methods of the invention can also be used to detect genetic lesions in a NOVX gene, thereby determining if a subject with the lesioned gene is at risk for a disorder characterized by aberrant cell proliferation and/or differentiation. In various embodiments, the methods include detecting, in a sample of cells from the subject, the presence or absence of a genetic lesion characterized by at least one of an alteration affecting the integrity of a gene encoding a NOVX-protein, or the misexpression of the NOVX gene. For example, such genetic lesions can be detected by ascertaining the existence of at least one of: (i) a deletion of one or more nucleotides from a NOVX gene; (ii) an addition of one or more nucleotides to a NOVX gene; (iii) a substitution of one or more nucleotides of a NOVX gene, (iv) a chromosomal rearrangement of a NOVX gene; (v) an alteration in the level of a messenger RNA transcript of a NOVX gene, (vi) aberrant modification of a NOVX gene, such as of the methylation pattern of the genomic DNA, (vii) the presence of a non-wild-type splicing pattern of a messenger RNA transcript of a NOVX gene, (viii) a non-wild-type level of a NOVX protein, (ix) allelic loss of a NOVX gene, and (x) inappropriate post-translational modification of a NOVX protein. As described herein, there are a large number of assay techniques known in the art which can be used for detecting lesions in a NOVX gene. A preferred biological sample is a peripheral blood leukocyte sample isolated by conventional means from a subject. However, any biological sample containing nucleated cells may be used, including, for example, buccal mucosal cells.

[0272] In certain embodiments, detection of the lesion involves the use of a probe/primer in a polymerase chain reaction (PCR) (see, e.g., U.S. Pat. Nos. 4,683,195 and 4,683,202), such as anchor PCR or RACE PCR, or, alternatively, in a ligation chain reaction (LCR) (see, e.g., Landegran, et al., 1988. Science 241: 1077-1080; and Nakazawa, et al., 1994. Proc. Natl. Acad. Sci. USA 91: 360-364), the latter of which can be particularly useful for detecting point mutations in the NOVX-gene (see, Abravaya, et al., 1995. Nucl. Acids Res. 23: 675-682). This method can include the steps of collecting a sample of cells from a patient, isolating nucleic acid (e.g., genomic, mRNA or both) from the cells of the sample, contacting the nucleic acid sample with one or more primers that specifically hybridize to a NOVX gene under conditions such that hybridization and amplification of the NOVX gene (if present) occurs, and detecting the presence or absence of an amplification product, or detecting the size of the amplification product and comparing the length to a control sample. It is anticipated that PCR and/or LCR may be desirable to use as a preliminary amplification step in conjunction with any of the techniques used for detecting mutations described herein.

[0273] Alternative amplification methods include: self sustained sequence replication (see, Guatelli, et al., 1990. Proc. Natl. Acad. Sci. USA 87: 1874-1878), transcriptional amplification system (see, Kwoh, et al., 1989. Proc. Natl. Acad. Sci. USA 86: 1173-1177); Qβ Replicase (see, Lizardi, et al, 1988. BioTechnology 6: 1197), or any other nucleic acid amplification method, followed by the detection of the amplified molecules using techniques well known to those of skill in the art. These detection schemes are especially useful for the detection of nucleic acid molecules if such molecules are present in very low numbers.

[0274] In an alternative embodiment, mutations in a NOVX gene from a sample cell can be identified by alterations in restriction enzyme cleavage patterns. For example, sample and control DNA is isolated, amplified (optionally), digested with one or more restriction endonucleases, and fragment length sizes are determined by gel electrophoresis and compared. Differences in fragment length sizes between sample and control DNA indicates mutations in the sample DNA. Moreover, the use of sequence specific ribozymes (see, e.g., U.S. Pat. No. 5,493,531) can be used to score for the presence of specific mutations by development or loss of a ribozyme cleavage site.

[0275] In other embodiments, genetic mutations in NOVX can be identified by hybridizing sample and control nucleic acids, e.g., DNA or RNA to high-density arrays containing hundreds or thousands of oligonucleotide probes. See, e.g., Cronin, et al., 1996. Human Mutation 7: 244-255; Kozal, et al., 1996. Nat. Med. 2: 753-759. For example, genetic mutations in NOVX can be identified in two-dimensional arrays containing light-generated DNA probes as described in Cronin, et al., supra. Briefly, a first hybridization array of probes can be used to scan through long stretches of DNA in a sample and control to identify base changes between the sequences by making linear arrays of sequential overlapping probes. This step allows the identification of point mutations. This is followed by a second hybridization array that allows the characterization of specific mutations by using smaller, specialized probe arrays complementary to all variants or mutations detected. Each mutation array is composed of parallel probe sets, one complementary to the wild-type gene and the other complementary to the mutant gene.

[0276] In yet another embodiment, any of a variety of sequencing reactions known in the art can be used to directly sequence the NOVX gene and detect mutations by comparing the sequence of the sample NOVX with the corresponding wild-type (control) sequence. Examples of sequencing reactions include those based on techniques developed by Maxim and Gilbert, 1977. Proc. Natl. Acad. Sci. USA 74: 560 or Sanger, 1977. Proc. Natl. Acad. Sci. USA 74: 5463. It is also contemplated that any of a variety of automated sequencing procedures can be utilized when performing the diagnostic assays (see, e.g., Naeve, et al., 1995. Biotechniques 19: 448), including sequencing by mass spectrometry (see, e.g., PCT International Publication No. WO 94/16101; Cohen, et al., 1996. Adv. Chromatography 36: 127-162; and Griffin, et al., 1993. Appl. Biochem. Biotechnol. 38: 147-159).

[0277] Other methods for detecting mutations in the NOVX gene include methods in which protection from cleavage agents is used to detect mismatched bases in RNA/RNA or RNA/DNA heteroduplexes. See, e.g., Myers, et al., 1985. Science 230: 1242. In general, the art technique of “mismatch cleavage” starts by providing heteroduplexes of formed by hybridizing (labeled) RNA or DNA containing the wild-type NOVX sequence with potentially mutant RNA or DNA obtained from a tissue sample. The double-stranded duplexes are treated with an agent that cleaves single-stranded regions of the duplex such as which will exist due to basepair mismatches between the control and sample strands. For instance, RNA/DNA duplexes can be treated with RNase and DNA/DNA hybrids treated with S₁ nuclease to enzymatically digesting the mismatched regions. In other embodiments, either DNA/DNA or RNA/DNA duplexes can be treated with hydroxylamine or osmium tetroxide and with piperidine in order to digest mismatched regions. After digestion of the mismatched regions, the resulting material is then separated by size on denaturing polyacrylamide gels to determine the site of mutation. See, e.g., Cotton, et al., 1988. Proc. Natl. Acad. Sci. USA 85: 4397; Saleeba, et al., 1992. Methods Enzymol. 217: 286-295. In an embodiment, the control DNA or RNA can be labeled for detection.

[0278] In still another embodiment, the mismatch cleavage reaction employs one or more proteins that recognize mismatched base pairs in double-stranded DNA (so called “DNA mismatch repair” enzymes) in defined systems for detecting and mapping point mutations in NOVX cDNAs obtained from samples of cells. For example, the mutY enzyme of E. coli cleaves A at G/A mismatches and the thymidine DNA glycosylase from HeLa cells cleaves T at G/T mismatches. See, e.g., Hsu, et al., 1994. Carcinogenesis 15: 1657-1662. According to an exemplary embodiment, a probe based on a NOVX sequence, e.g., a wild-type NOVX sequence, is hybridized to a cDNA or other DNA product from a test cell(s). The duplex is treated with a DNA mismatch repair enzyme, and the cleavage products, if any, can be detected from electrophoresis protocols or the like. See, e.g., U.S. Pat. No. 5,459,039.

[0279] In other embodiments, alterations in electrophoretic mobility will be used to identify mutations in NOVX genes. For example, single strand conformation polymorphism (SSCP) may be used to detect differences in electrophoretic mobility between mutant and wild type nucleic acids. See, e.g., Orita, et al., 1989. Proc. Natl. Acad. Sci. USA: 86: 2766; Cotton, 1993. Mutat. Res. 285: 125-144; Hayashi, 1992. Genet. Anal. Tech. Appl. 9: 73-79. Single-stranded DNA fragments of sample and control NOVX nucleic acids will be denatured and allowed to renature. The secondary structure of single-stranded nucleic acids varies according to sequence, the resulting alteration in electrophoretic mobility enables the detection of even a single base change. The DNA fragments may be labeled or detected with labeled probes. The sensitivity of the assay may be enhanced by using RNA (rather than DNA), in which the secondary structure is more sensitive to a change in sequence. In one embodiment, the subject method utilizes heteroduplex analysis to separate double stranded heteroduplex molecules on the basis of changes in electrophoretic mobility. See, e.g., Keen, et al., 1991. Trends Genet. 7: 5.

[0280] In yet another embodiment, the movement of mutant or wild-type fragments in polyacrylamide gels containing a gradient of denaturant is assayed using denaturing gradient gel electrophoresis (DGGE). See, e.g., Myers, et al., 1985. Nature 313: 495. When DGGE is used as the method of analysis, DNA will be modified to insure that it does not completely denature, for example by adding a GC clamp of approximately 40 bp of high-melting GC-rich DNA by PCR. In a further embodiment, a temperature gradient is used in place of a denaturing gradient to identify differences in the mobility of control and sample DNA. See, e.g., Rosenbaum and Reissner, 1987. Biophys. Chem. 265: 12753.

[0281] Examples of other techniques for detecting point mutations include, but are not limited to, selective oligonucleotide hybridization, selective amplification, or selective primer extension. For example, oligonucleotide primers may be prepared in which the known mutation is placed centrally and then hybridized to target DNA under conditions that permit hybridization only if a perfect match is found. See, e.g., Saiki, et al., 1986. Nature 324: 163; Saiki, et al., 1989. Proc. Natl. Acad. Sci. USA 86: 6230. Such allele specific oligonucleotides are hybridized to PCR amplified target DNA or a number of different mutations when the oligonucleotides are attached to the hybridizing membrane and hybridized with labeled target DNA.

[0282] Alternatively, allele specific amplification technology that depends on selective PCR amplification may be used in conjunction with the instant invention. Oligonucleotides used as primers for specific amplification may carry the mutation of interest in the center of the molecule (so that amplification depends on differential hybridization; see, e.g., Gibbs, et al., 1989. Nucl. Acids Res. 17: 2437-2448) or at the extreme 3′-terminus of one primer where, under appropriate conditions, mismatch can prevent, or reduce polymerase extension (see, e.g., Prossner, 1993. Tibtech. 11: 238). In addition it may be desirable to introduce a novel restriction site in the region of the mutation to create cleavage-based detection. See, e.g., Gasparini, et al., 1992. Mol. Cell Probes 6: 1. It is anticipated that in certain embodiments amplification may also be performed using Taq ligase for amplification. See, e.g., Barany, 1991. Proc. Natl. Acad. Sci. USA 88: 189. In such cases, ligation will occur only if there is a perfect match at the 3′-terminus of the 5′ sequence, making it possible to detect the presence of a known mutation at a specific site by looking for the presence or absence of amplification.

[0283] The methods described herein may be performed, for example, by utilizing pre-packaged diagnostic kits comprising at least one probe nucleic acid or antibody reagent described herein, which may be conveniently used, e.g., in clinical settings to diagnose patients exhibiting symptoms or family history of a disease or illness involving a NOVX gene.

[0284] Furthermore, any cell type or tissue, preferably peripheral blood leukocytes, in which NOVX is expressed may be utilized in the prognostic assays described herein. However, any biological sample containing nucleated cells may be used, including, for example, buccal mucosal cells.

### Pharmacogenomics

[0285] Agents, or modulators that have a stimulatory or inhibitory effect on NOVX activity (e.g., NOVX gene expression), as identified by a screening assay described herein can be administered to individuals to treat (prophylactically or therapeutically) disorders (The disorders include metabolic disorders, diabetes, obesity, infectious disease, anorexia, cancer-associated cachexia, cancer, neurodegenerative disorders, Alzheimer's Disease, Parkinson's Disorder, immune disorders, and hematopoietic disorders, and the various dyslipidemias, metabolic disturbances associated with obesity, the metabolic syndrome X and wasting disorders associated with chronic diseases and various cancers.) In conjunction with such treatment, the pharmacogenomics (i.e., the study of the relationship between an individual's genotype and that individual's response to a foreign compound or drug) of the individual may be considered. Differences in metabolism of therapeutics can lead to severe toxicity or therapeutic failure by altering the relation between dose and blood concentration of the pharmacologically active drug. Thus, the pharmacogenomics of the individual permits the selection of effective agents (e.g., drugs) for prophylactic or therapeutic treatments based on a consideration of the individual's genotype. Such pharmacogenomics can further be used to determine appropriate dosages and therapeutic regimens. Accordingly, the activity of NOVX protein, expression of NOVX nucleic acid, or mutation content of NOVX genes in an individual can be determined to thereby select appropriate agent(s) for therapeutic or prophylactic treatment of the individual.

[0286] Pharmacogenomics deals with clinically significant hereditary variations in the response to drugs due to altered drug disposition and abnormal action in affected persons. See e.g., Eichelbaum, 1996. Clin. Exp. Pharmacol. Physiol., 23: 983-985; Linder, 1997. Clin. Chem., 43: 254-266. In general, two types of pharmacogenetic conditions can be differentiated. Genetic conditions transmitted as a single factor altering the way drugs act on the body (altered drug action) or genetic conditions transmitted as single factors altering the way the body acts on drugs (altered drug metabolism). These pharmacogenetic conditions can occur either as rare defects or as polymorphisms. For example, glucose-6-phosphate dehydrogenase (G6PD) deficiency is a common inherited enzymopathy in which the main clinical complication is hemolysis after ingestion of oxidant drugs (anti-malarials, sulfonamides, analgesics, nitrofurans) and consumption of fava beans.

[0287] As an illustrative embodiment, the activity of drug metabolizing enzymes is a major determinant of both the intensity and duration of drug action. The discovery of genetic polymorphisms of drug metabolizing enzymes (e.g., N-acetyltransferase 2 (NAT 2) and cytochrome Pregnancy Zone Protein Precursor enzymes CYP2D6 and CYP2C19) has provided an explanation as to why some patients do not obtain the expected drug effects or show exaggerated drug response and serious toxicity after taking the standard and safe dose of a drug. These polymorphisms are expressed in two phenotypes in the population, the extensive metabolizer (EM) and poor metabolizer (PM). The prevalence of PM is different among different populations. For example, the gene coding for CYP2D6 is highly polymorphic and several mutations have been identified in PM, which all lead to the absence of functional CYP2D6. Poor metabolizers of CYP2D6 and CYP2C19 quite frequently experience exaggerated drug response and side effects when they receive standard doses. If a metabolite is the active therapeutic moiety, PM show no therapeutic response, as demonstrated for the analgesic effect of codeine mediated by its CYP2D6-formed metabolite morphine. At the other extreme are the so called ultra-rapid metabolizers who do not respond to standard doses. Recently, the molecular basis of ultra-rapid metabolism has been identified to be due to CYP2D6 gene amplification.

[0288] Thus, the activity of NOVX protein, expression of NOVX nucleic acid, or mutation content of NOVX genes in an individual can be determined to thereby select appropriate agent(s) for therapeutic or prophylactic treatment of the individual. In addition, pharmacogenetic studies can be used to apply genotyping of polymorphic alleles encoding drug-metabolizing enzymes to the identification of an individual's drug responsiveness phenotype. This knowledge, when applied to dosing or drug selection, can avoid adverse reactions or therapeutic failure and thus enhance therapeutic or prophylactic efficiency when treating a subject with a NOVX modulator, such as a modulator identified by one of the exemplary screening assays described herein.

### Monitoring of Effects During Clinical Trials

[0289] Monitoring the influence of agents (e.g., drugs, compounds) on the expression or activity of NOVX (e.g., the ability to modulate aberrant cell proliferation and/or differentiation) can be applied not only in basic drug screening, but also in clinical trials. For example, the effectiveness of an agent determined by a screening assay as described herein to increase NOVX gene expression, protein levels, or upregulate NOVX activity, can be monitored in clinical trails of subjects exhibiting decreased NOVX gene expression, protein levels, or downregulated NOVX activity. Alternatively, the effectiveness of an agent determined by a screening assay to decrease NOVX gene expression, protein levels, or downregulate NOVX activity, can be monitored in clinical trails of subjects exhibiting increased NOVX gene expression, protein levels, or upregulated NOVX activity. In such clinical trials, the expression or activity of NOVX and, preferably, other genes that have been implicated in, for example, a cellular proliferation or immune disorder can be used as a “read out” or markers of the immune responsiveness of a particular cell.

[0290] By way of example, and not of limitation, genes, including NOVX, that are modulated in cells by treatment with an agent (e.g., compound, drug or small molecule) that modulates NOVX activity (e.g., identified in a screening assay as described herein) can be identified. Thus, to study the effect of agents on cellular proliferation disorders, for example, in a clinical trial, cells can be isolated and RNA prepared and analyzed for the levels of expression of NOVX and other genes implicated in the disorder. The levels of gene expression (i.e., a gene expression pattern) can be quantified by Northern blot analysis or RT-PCR, as described herein, or alternatively by measuring the amount of protein produced, by one of the methods as described herein, or by measuring the levels of activity of NOVX or other genes. In this manner, the gene expression pattern can serve as a marker, indicative of the physiological response of the cells to the agent. Accordingly, this response state may be determined before, and at various points during, treatment of the individual with the agent.

[0291] In one embodiment, the invention provides a method for monitoring the effectiveness of treatment of a subject with an agent (e.g., an agonist, antagonist, protein, peptide, peptidomimetic, nucleic acid, small molecule, or other drug candidate identified by the screening assays described herein) comprising the steps of (i) obtaining a pre-administration sample from a subject prior to administration of the agent; (ii) detecting the level of expression of a NOVX protein, mRNA, or genomic DNA in the preadministration sample; (iii) obtaining one or more post-administration samples from the subject; (iv) detecting the level of expression or activity of the NOVX protein, mRNA, or genomic DNA in the post-administration samples; (v) comparing the level of expression or activity of the NOVX protein, mRNA, or genomic DNA in the pre-administration sample with the NOVX protein, mRNA, or genomic DNA in the post administration sample or samples; and (vi) altering the administration of the agent to the subject accordingly. For example, increased administration of the agent may be desirable to increase the expression or activity of NOVX to higher levels than detected, i.e., to increase the effectiveness of the agent. Alternatively, decreased administration of the agent may be desirable to decrease expression or activity of NOVX to lower levels than detected, i.e., to decrease the effectiveness of the agent.

### Methods of Treatment

[0292] The invention provides for both prophylactic and therapeutic methods of treating a subject at risk of (or susceptible to) a disorder or having a disorder associated with aberrant NOVX expression or activity. The disorders include cardiomyopathy, atherosclerosis, hypertension, congenital heart defects, aortic stenosis, atrial septal defect (ASD), atrioventricular (A-V) canal defect, ductus arteriosus, pulmonary stenosis, subaortic stenosis, ventricular septal defect (VSD), valve diseases, tuberous sclerosis, scleroderma, obesity, transplantation, adrenoleukodystrophy, congenital adrenal hyperplasia, prostate cancer, neoplasm; adenocarcinoma, lymphoma, uterus cancer, fertility, hemophilia, hypercoagulation, idiopathic thrombocytopenic purpura, immunodeficiencies, graft versus host disease, AIDS, bronchial asthma, Crohn's disease; multiple sclerosis, treatment of Albright Hereditary Ostoeodystrophy, and other diseases, disorders and conditions of the like.

[0293] These methods of treatment will be discussed more fully, below.

### Diseases and Disorders

[0294] Diseases and disorders that are characterized by increased (relative to a subject not suffering from the disease or disorder) levels or biological activity may be treated with Therapeutics that antagonize (i.e., reduce or inhibit) activity. Therapeutics that antagonize activity may be administered in a therapeutic or prophylactic manner. Therapeutics that may be utilized include, but are not limited to: (i) an aforementioned peptide, or analogs, derivatives, fragments or homologs thereof; (ii) antibodies to an aforementioned peptide; (iii) nucleic acids encoding an aforementioned peptide; (iv) administration of antisense nucleic acid and nucleic acids that are “dysfunctional” (i.e., due to a heterologous insertion within the coding sequences of coding sequences to an aforementioned peptide) that are utilized to “knockout” endogenous function of an aforementioned peptide by homologous recombination (see, e.g., Capecchi, 1989. Science 244: 1288-1292); or (v) modulators (i.e., inhibitors, agonists and antagonists, including additional peptide mimetic of the invention or antibodies specific to a peptide of the invention) that alter the interaction between an aforementioned peptide and its binding partner.

[0295] Diseases and disorders that are characterized by decreased (relative to a subject not suffering from the disease or disorder) levels or biological activity may be treated with Therapeutics that increase (i.e., are agonists to) activity. Therapeutics that upregulate activity may be administered in a therapeutic or prophylactic manner. Therapeutics that may be utilized include, but are not limited to, an aforementioned peptide, or analogs, derivatives, fragments or homologs thereof; or an agonist that increases bioavailability.

[0296] Increased or decreased levels can be readily detected by quantifying peptide and/or RNA, by obtaining a patient tissue sample (e.g., from biopsy tissue) and assaying it in vitro for RNA or peptide levels, structure and/or activity of the expressed peptides (or mRNAs of an aforementioned peptide). Methods that are well-known within the art include, but are not limited to, immunoassays (e.g., by Western blot analysis, immunoprecipitation followed by sodium dodecyl sulfate (SDS) polyacrylamide gel electrophoresis, immunocytochemistry, etc.) and/or hybridization assays to detect expression of mRNAs (e.g., Northern assays, dot blots, in situ hybridization, and the like).

### Prophylactic Methods

[0297] In one aspect, the invention provides a method for preventing, in a subject, a disease or condition associated with an aberrant NOVX expression or activity, by administering to the subject an agent that modulates NOVX expression or at least one NOVX activity. Subjects at risk for a disease that is caused or contributed to by aberrant NOVX expression or activity can be identified by, for example, any or a combination of diagnostic or prognostic assays as described herein. Administration of a prophylactic agent can occur prior to the manifestation of symptoms characteristic of the NOVX aberrancy, such that a disease or disorder is prevented or, alternatively, delayed in its progression. Depending upon the type of NOVX aberrancy, for example, a NOVX agonist or NOVX antagonist agent can be used for treating the subject. The appropriate agent can be determined based on screening assays described herein. The prophylactic methods of the invention are further discussed in the following subsections.

### Therapeutic Methods

[0298] Another aspect of the invention pertains to methods of modulating NOVX expression or activity for therapeutic purposes. The modulatory method of the invention involves contacting a cell with an agent that modulates one or more of the activities of NOVX protein activity associated with the cell. An agent that modulates NOVX protein activity can be an agent as described herein, such as a nucleic acid or a protein, a naturally-occurring cognate ligand of a NOVX protein, a peptide, a NOVX peptidomimetic, or other small molecule. In one embodiment, the agent stimulates one or more NOVX protein activity. Examples of such stimulatory agents include active NOVX protein and a nucleic acid molecule encoding NOVX that has been introduced into the cell. In another embodiment, the agent inhibits one or more NOVX protein activity. Examples of such inhibitory agents include antisense NOVX nucleic acid molecules and anti-NOVX antibodies. These modulatory methods can be performed in vitro (e.g., by culturing the cell with the agent) or, alternatively, in vivo (e.g., by administering the agent to a subject). As such, the invention provides methods of treating an individual afflicted with a disease or disorder characterized by aberrant expression or activity of a NOVX protein or nucleic acid molecule. In one embodiment, the method involves administering an agent (e.g., an agent identified by a screening assay described herein), or combination of agents that modulates (e.g., up-regulates or down-regulates) NOVX expression or activity. In another embodiment, the method involves administering a NOVX protein or nucleic acid molecule as therapy to compensate for reduced or aberrant NOVX expression or activity.

[0299] Stimulation of NOVX activity is desirable in situations in which NOVX is abnormally downregulated and/or in which increased NOVX activity is likely to have a beneficial effect. One example of such a situation is where a subject has a disorder characterized by aberrant cell proliferation and/or differentiation (e.g., cancer or immune associated disorders). Another example of such a situation is where the subject has a gestational disease (e.g., preclampsia).

### Determination of the Biological Effect of the Therapeutic

[0300] In various embodiments of the invention, suitable in vitro or in vivo assays are performed to determine the effect of a specific Therapeutic and whether its administration is indicated for treatment of the affected tissue.

[0301] In various specific embodiments, in vitro assays may be performed with representative cells of the type(s) involved in the patient's disorder, to determine if a given Therapeutic exerts the desired effect upon the cell type(s). Compounds for use in therapy may be tested in suitable animal model systems including, but not limited to rats, mice, chicken, cows, monkeys, rabbits, and the like, prior to testing in human subjects. Similarly, for in vivo testing, any of the animal model system known in the art may be used prior to administration to human subjects.

### Prophylactic and Therapeutic Uses of the Compositions of the Invention

[0302] The NOVX nucleic acids and proteins of the invention are useful in potential prophylactic and therapeutic applications implicated in a variety of disorders including, but not limited to: metabolic disorders, diabetes, obesity, infectious disease, anorexia, cancer-associated cancer, neurodegenerative disorders, Alzheimer's Disease, Parkinson's Disorder, immune disorders, hematopoietic disorders, and the various dyslipidemias, metabolic disturbances associated with obesity, the metabolic syndrome X and wasting disorders associated with chronic diseases and various cancers.

[0303] As an example, a cDNA encoding the NOVX protein of the invention may be useful in gene therapy, and the protein may be useful when administered to a subject in need thereof. By way of non-limiting example, the compositions of the invention will have efficacy for treatment of patients suffering from: metabolic disorders, diabetes, obesity, infectious disease, anorexia, cancer-associated cachexia, cancer, neurodegenerative disorders, Alzheimer's Disease, Parkinson's Disorder, immune disorders, hematopoietic disorders, and the various dyslipidemias.

[0304] Both the novel nucleic acid encoding the NOVX protein, and the NOVX protein of the invention, or fragments thereof, may also be useful in diagnostic applications, wherein the presence or amount of the nucleic acid or the protein are to be assessed. A further use could be as an anti-bacterial molecule (i.e., some peptides have been found to possess anti-bacterial properties). These materials are further useful in the generation of antibodies, which immunospecifically-bind to the novel substances of the invention for use in therapeutic or diagnostic methods.

[0305] The invention will be further described in the following examples, which do not limit the scope of the invention described in the claims.

### EXAMPLES

### Example A

### Polynucleotide And Polypeptide Sequences, And Homology Data

[0306] The NOV1 clone was analyzed, and the nucleotide and encoded polypeptide sequences are shown in Table 1A.

TABLE 1A
NOV1 Sequence Analysis

| | | |
|---|---|---|
| NOV1a, CG104903-09 | SEQ ID NO: 1 | 1984 bp |
| DNA Sequence | ORF Start: ATG at 50 | ORF Stop: TAA at 1982 |

AATTCCGGTTGAAACCATCCCTCAGCTCCTAGAGGGAGATTCTTAGATCATGAAACTAATTACCATCC
TTTTCCTCTGCTCCAGGCTACTACTAAGTTTAACCCAGGAATCACAGTCCGAGGAAATTGACTGCAAT
GACAAGGATTTATTTAAAGCTGTGGATGCTGCTCTGAAGAAATATAACAGTCAAAACCAAAGTAACAA
CCAGTTTGTATTGTACCGCATAACTGAAGCCACTAAGACGGTTGGCTCTGACACGTTTTATTCCTTCA
AGTACGAAATCAAGGAGGGGCATTGTCCTGTTCAAAGTGGCAAAACCTGGCAGGACTGTGAGTACAAG
GATGCTGCAAAAGCAGCCACTGGAGAATGCACGGCAACCGTGGGGAAGAGGAGCAGTACGAAATTCTC
CGTGGCTACCCAGACCTGCCAGATTACTCCAGCCGAGGGCCCTGTGGTGACAGCCCAGTACGACTGCC
TCGGCTGTGTGCATCCTATATCAACGCAGAGCCCAGACCTGGAGCCCATTCTGAGACACGGCATTCAG
TACTTTAACAACAACACTCAACATTCCTCCCTCTTCATGCTTAATGAAGTAAAACGGGCCCAAAGACA
GGTGGTGGCTGGATTGAACTTTCGAATTACCTACTCAATTGTGCAAACGAATTGTTCCAAAGAGAATT
TTCTGTTCTTAACTCCAGACTGCAAGTCCCTTTGGAATGGTGATACCGGTGAATGTACAGATAATGCA
TACATCGATATTCAGCTACGAATTGCTTCCTTCTCACAGAACTGTGACATTTATCCAGGGAAGGATTT
TGTACAACCACCTACCAAGATTTGCGTGGGCTGCCCCAGAGATATACCCACCAACAGCCCACAGCTGG
AGGAGACACTGACTCACACCATCACAAAGCTTAATGCAGAGAATAACGCAACTTTCTATTTCAAGATT
GACAATGTGAAAAAAGGAAGAGTACAGGTGGTGGCTGGCAAGAAATATTTTATTGACTTCGTGGCCAG
GGAAACCACATGTTCCAAGGAAAGTAATGAAGAGTTGACCGAAAGCTGTGAGACCAAAAAACTTGGCC
AAAGCCTAGATTGCAACGCTGAAGTTTATGTGGTACCCTGGGAGAAAAAAATTTACCCTACTGTCAAC
TGTCAACCACTGGGAATGATCTCACTGATGAAAAGGCCTCCAGGTTTTTCACCTTTCCGATCATCACG
AATAGGGGAAATAAAAGAAGAAACAACTGTAAGTCCACCCCACACTTCCATGGCACCTGCACAAGATG
AAGAGCGGGATTCAGGAAAAGAACAAGGGCATACTCGTAGACATGACTGGGGCCATGAAAAACAAAGA
AAACATAATCTTGGCCATGGCCATAAACATGAACGTGACCAAGGGCATGGGCACCAAAGAGGACATGG
CCTTGGCCATGGACACGAACAACAGCATGGTCTTGGTCATGGACATAAGTTCAAACTTGATGATGATG
TTGAACACCAAGGGGGCCATGTCCTTGACCATGGACATAAGCATAAGCATGGTCATGGCCACGGAAAA
CATAAAAATAAAGGCAAAAAGAATGGAAACCACAATGGTTGGAAAACAGAGCATTTGGCAAGCTCTTC
TGAAGACAGTACTACACCTTCTGCACAGACACAAGAGAAGACACAAGGGCCAACACCCATCCCTTCCC
TAGCCAAGCCAGGTGTAACAGTTACCTTTTCTGACTTTCAGGACTCTGATCTCATTGCAACTATGATG
CCTCCTATATCACCAGCTCCCATACAGAGTGATGACCATTGGATCCCTGATATCCAGATAGACCCAAA
TGGCCTTTCATTTAACCCAATATCAGATTTTCCAGACACGACCTCCCCAAAATGTCCTGGACGCCCCT
GGAAGTCAGTTAGTGAAATTAATCCAACCACACAAATGAAAGAATCTTATTATTTCGATCTCACTGAT
GGCCTTTCTTAA

| | | | |
|---|---|---|---|
| NOV1a, CG104903-09 | | | |
| Protein Sequence | SEQ ID NO: 2 | 644 aa | MW at 71956.8 kD |

MKLITILFLCSRLLLSLTQESQSEEIDCNDKDLFKAVDAALKKYNSQNQSNNQFVLYRITEATKTVGS
DTFYSFKYEIKEGDCPVQSGKTWQDCEYKDAAKAATGECTATVGKRSSTKFSVATQTCQITPAEGPVV
TAQYDCLGCVHPISTQSPDLEPILRHGIQYFNNNTQHSSLFMLNEVKRAQRQVVAGLNFRITYSIVQT
NCSKENFLFLTPDCKSLWNGDTGECTDNAYIDIQLRIASFSQNCDIYPGKDFVQPPTKICVGCPRDIP
TNSPELEETLTHTITKLNAENNATFYFKIDNVKKARVQVVAGKKYFIDFVARETTCSKESNEELTESC
ETKKLGQSLDCNAEVYVVPWEKKIYPTVNCQPLGMISLMKRPPGFSPFRSSRIGEIKEETTVSPPHTS
MAPAQDEERDSGKEQGHTRRHDWGHEKQRKHNLGHGHKHERDQGHGHQRGHGLGHGHEQQHGLGHGHK
FKLDDDLEHQGGHVLDHGHKHKHGHGHGKHKNKGKKNGKHNGWKTEHLASSSEDSTTPSAQTQEKTEG
PTPIPSLAKPGVTVTFSDFODSDLIATMMPPISPAPIOSDDDWIPDIOIDPNGLSFNPISDFPDTTSP
KCPGRPWKSVSEINPTTQMKESYYFDLTDGLS

| | | |
|---|---|---|
| NOV1b, CG104903-03 | SEQ ID NO: 3 | 1981 bp |
| DNA Sequence | ORF Start: ATG at 50 | ORF Stop: end of sequence |

AATTCCGGTTGAAACCATCCCTCAGCTCCTAGAGGGAGATTGTTAGATCATGAAACTAATTACCATCC
TTTTCCTCTGCTCCAGGCTACTACTAAGTTTAACCCAGGAATCACAGTCCGAGGAAATTGACTGCAAT
GACAAGGATTTATTTAAAGCTGTGGATGCTGCTCTGAAGAAATATAACAGTCAAAACCAAAGTAACAA
CCAGTTTGTATTGTACCGCATAACTGAAGCCACTAAGACGGTTGGCTCTGACACGTTTTATTCCTTCA
AGTACGAAATCAAGGAGGGGGATTGTCCTGTTCAAAGTGGCAAAACCTGGCAGGACTGTGAGTACAAG
GATGCTGCAAAAGCAGCCACTGGAGAATGCACGGCAACCGTGGGGAAGAGGAGCAGTACGAAATTCTC
CGTGGCTACCCAGACCTGCCAGATTACTCCAGCCGAGGGCCCTGTGGTGACAGCCCAGTACGACTGCC
TCGGCTGTGTGCATCCTATATCAACGCAGAGCCCAGACCTGGAGCCCATTCTGAGACACGGCATTCAG
TACTTTAACAACAACACTCAACATTCCTCCCTCTTCATGCTTAATGAAGTAAAACGGGCCCAAAGACA
GGTGGTGGCTGGATTGAACTTTCGAATTACCTACTCAATTGTGCAAACGAATTGTTCCAAAGAGAATT
TTCTGTTCTTAACTCCAGACTGCAAGTCCCTTTGGAATGGTGATACCGGTGAATGTACAGATAATGCA
TACATCGATATTCAGCTACGAATTGCTTCCTTCTCACAGAACTGTGACATTTATCCAGGGAAGGATTT
TGTACAACCACCTACCAAGATTTGCGTGGGCTGCCCCAGAGATATACCCACCAACAGCCCAGACCTGG
AGGAGACACTGACTCACACCATCACAAAGCTTAATGCAGAGAATAACGCAACTTTCTATTTGAAGATT
GACAATGTGAAAAAAGCAAGAGTACAGGTGGTGGCTGGCAAGAAATATTTTATTGACTTCGTGGGCAG
GGAAACCACATGTTCCAAGGAAAGTAATGAAGAGTTGACCGAAAGCTGTGAGACCAAAAAACTTGGCC
AAAGCCTAGATTGCAACGCTGAAGTTTATGTGGTACCCTGGGAGAAAAAAATTTACCCTACTGTCAAC
TGTCAACCACTGGGAATGATCTCACTGATGAAAAGGCCTCCAGGTTTTTCACCTTTCCGATCATCACG
AATAGGGGAAATAAAAGAAGAAACAACTGTAAGTCCACCCCACACTTCCATGGCACCTGCACAAGATG
AAGAGCGGGATTCAGGAAAAGAACAAGGGCATACTCGTAGACATGACTGGGGCCATGAAAAACAAAGA
AAACATAATCTTGGCCATGGCCATAAACATGAACGTGACCAAGGGCATGGGCACCAAAGAGGACATGG
CCTTGGCCATGGACACGAACAACAGCATGGTCTTGGTCATGGACATAAGTTCAAACTTCATGATGATC
TTGAACACCAAGGGGGCCATGTCCTTGACCATGGACATAAGCATAAGCATGGTCATGGCCACGGAAAA
CATAAAAATAAAGGCAAAAAGAATGGAAAGCACAATGGTTGGAAAACAGAGCATTTGGCAAGCTCTTC
TGAAGACAGTACTACACCTTCTGCACAGACACAAGAGAAGACAGAAGGGCCAACACCCATCCCTTCCC
TAGCCAAGCCAGGTGTAACAGTTACCTTTTCTGACTTTCAGGACTCTGATCTCATTGCAACTATCATG
CCTCCTATATCACCAGCTCCCATACAGAGTGATGACGATTGGATCCCTGATATCCAGATACACCCAAA
TGGCCTTTCATTTAACCCAATATCAGATTTTCCAGACACGACCTCCCCAAAATGTCCTGGACGCCCCT
GGAAGTCAGTTAGTGAAATTAATCCAACCACACAAATGAAAGAATCTTATTATTTCGATCTCACTGAT
GGCCTTTCT

| | | | |
|---|---|---|---|
| NOV1b, CG104903-03 | | | |
| Protein Sequence | SEQ ID NO: 4 | 644 aa | MW at 71956.8 kD |

MKLITILFLCSRLLLSLTQESQSEEIDCNDKDLFKAVDAALKKYNSQNQSNNQFVLYRITEATKTVGS
DTFYSFKYEIKEGDCPVQSGKTWQDCEYKDAAKAATGECTATVGKRSSTKFSVATQTCQITPAEGPVV
TAQYDCLGCVHPISTQSPDLEPILRHGIQYFNNNTQHSSLFMLNEVKRAQRQVVAGLNFRITYSIVQT
NCSKENFLFLTPDCKSLWNGDTGECTDNAYIDIQLRIASFSQNCDIYPGKDFVQPPTKICVGCPRDIP
TNSPELEETLTHTITKLNAENNATFYFKIDNVKKARVQVVAGKKYFIDFVARETTCSKESNEELTESC
ETKKLGQSLDCNAEVYVVPWEKKIYPTVNCQPLGMISLMKRPPGFSPFRSSRIGEIKEETTVSPPHTS
MAPAQDEERDSGKEQGHTRRHDWGHEKQRKHNLGHGHKHERDQGHGHQRGHGLGHGHEQQHGLCHGHK
FKLDDDLEHQGGHVLDHGHKHKHGHGHGKHKNKGKKNGKHNGWKTEHLASSSEDSTTPSAQTQEKTEG
PTPIPSLAKPGVTVTFSDFQDSDLIATMMPPISPAPIQSDDDWIPDIQIDPNCLSFNPISDFPDTTSP
KCPGRPWKSVSEINPTTQMKESYYFDLTDGLS

| | | |
|---|---|---|
| NOV1c, 316514816 | SEQ ID NO: 5 | 1935 bp |
| DNA Sequence | ORF Start: at 1 | ORF Stop: TAG at 1933 |

ATGAAACTAATTACCATCCTTTTCCTCTGCTCCAGGCTACTACTAAGTTTAAC
CCAGGAATCACAGTCCGAGGAAATTGACTGCAATGACAAGGATTTATTTAAAGCTGTGGATGCTGCTC
TGAAGAAATATAACAGTCAAAACCAAAGTAACAACCAGTTTGTATTGTACCGCATAACTGAAGCCACT
AAGACGGTTGGCTCTGACACGTTTTATTCCTTCAAGTACGAAATCAAGGAGGGGGACTGTCCTGTTCA
AAGTGGCAAAACCTGGCAGGACTGTGAGTACAAGGATGCAGCAAAAGCAGCCACTGGAGAATGCACGG
CAACCGTGGGGAAGAGGAGCAGTACCAAATTCTCCGTGGCTACCCAGACCTGCCAGATTACTCCAGCC
GACGGCCCTGTGGTGACAGCCCAGTACGACTGCCTCGGCTGTGTGCATCCTATATCAACGCAGAGCCC
AGACCTGGAGCCCATTCTGAGACACGGCATTCAGTACTTTAACAACAACACTCAACATTCCTCCCTCT
TCACGCTTAATGAAGTAAAACGGGCCCAAAGACAGGTGGTGGCTGGATTGAACTTTCGAATTACCTAC
TCAATTGTGCAAACGAATTGTTCCAAAGAGAATTTTCTGTTCTTAACTCCAGACTGCAAGTCCCTTTG
GAATGGTGATACCGGTGAATGTACAGATAATGCATACATCGATATTCAGCTACGAATTGCTTCCTTCT
CACAGAACTGTGACATTTATCCAGGGAAGGATTTTGTACAACCACCTACCAAGATTTGCGTGGGCTGC
CCCAGAGATATACCCACCAACAGCCCAGAGCTGGAGGAGACACTGACTCACACCATCACAAAGCTTAA
TGCAGAGAATAACGCAACTTTCTATTTCAAGATTGACAATGTGAAAAAAGCAAGAGTACAGGTGGTGG
CTGGCAAGAAATATTTTATTGACTTCGTGGCCAGGGAAACCACATGTTCCAAGGAAAGTAATGAAGAG
TTGACCGAAAGCTGTGAGACCAAAAAACTTGGCCAAAGCCTAGATTGCAACGCTGAAGTTTATGTGGT
ACCCTGGGAGAAAAAAATTTACCCTACTGTCAACTGTCAACCACTGGGAATGATCTCACTGATGAAAA
GGCCTCCAGGTTTTTCACCTTTCCGATCATCACGAATAGGGGAAATAAAAGAAGAAACAACTGTAAGT
CCACCCCACACTTCCATGGCACCTGCACAAGATGAAGAGCGGGATTCAGGAAAAGAACAAGGGCATAC
TCGTAGACATGACTGGGGCCATGAAAAACAAAGAAAACATAATCTTGGCCATGGCCATAAACATGAAC
GTGACCAAGGGCATGGGCACCAAAGAGGACATGGCCTTGGCCATGGACACGAACAACAGCATGGTCTT
GGTCATGGACATAAGTTCAAACTTGATGATGATCTTGAACACCAAGGGGGCCATGTCCTTGACCATGG
ACATAAGCATAAGCATGGTCATGGCCACGGAAAACATAAAAATAAAGGCAAAAAGAATGGAAAGCACA
ATGGTTGGAAAACAGAGCATTTGGCAAGCTCTTCTGAAGACAGTACTACACCTTCTGCACAGACACAA
GACAAGACAGAAGGGCCAACACCCATCCCTTCCCTAGCCAAGCCAGGTGTAACAGTTACCTTTTCTGA
CTTTCAGGACTCTCATCTCATTCCAACTATGATGCCTCCTATATCACCAGCTCCCATACAGAGTGATG
ACGATTGGATCCCTGATATCCAGATAGACCCAAATGGCCTTTCATTTAACCCAATATCAGATTTTCCA
GACACGACCTCCCCAAAATGTCCTGGACGCCCCTGGAAGTCAGTTAGTGAAATTAATCCAACCACACA
AATGAAAGAATCTTATTATTTCGATCTCACTGATGGCCTTTCTTAG

| | | | |
|---|---|---|---|
| NOV1c, 316514816 | | | |
| Protein Sequence | SEQ ID NO: 6 | 644 aa | MW at 71927.7 kD |

[sequence omitted]

| | | |
|---|---|---|
| NOV1d, 308780224 | SEQ ID NO: 7 | 327 bp |
| DNA Sequence | ORF Start: at 1 | ORF Stop: end of sequence |

TGCACCTGCACAAGATGAAGAGCGGGATTCAGGAAAAGAACAAGGGCATACTCGTAGAC
ATGACTGGGGCCATGAAAAACAAAGAAAACATAATCTTGGCCATGGCCATAAACATGAACGTGACCAA
GCGCATGGGCACCAAAGAGGACATGGCCTTGGCCATGGACACGAACAACAGCATGGTCTTGGTCATGG
ACATAAGTTCAAACTTCATGATGATCTTGAACACCAAGGGGGCCATGTCCTTGACCATGGACATAAGC
ATAAGCATGGTCATGGCCACGGAAAAGATAAAAATAAAGGCAAAAAGAATGGAAAGCACAATGG

| | | | |
|---|---|---|---|
| NOV1d, 308780224 | | | |
| Protein Sequence | SEQ ID NO: 8 | 109 aa | MW at 12335.1 kD |

APAQDEERDSGKEQGHTRRHDWGHEKQRKHNLGHGHKHERDQGHGHQRGHGLGHGHEQQHGLGHG
HKFKLDDDLEHQGGHVLDHGHKHKHGHGHGKHKNKGKKNGKHNG

| | | |
|---|---|---|
| NOV1e, 308900326 | SEQ ID NO: 9 | 1071 bp |
| DNA Sequence | ORF Start: at 1 | ORF Stop: end of sequence |

ATGAAACTAATTACCATCCTTTTCCTCTGCTCCAGGCTACTACTAAGTTTAA
CCCAGGAATCACAGTCCGAGGAAATTGACTGCAATGACAAGGATTTATTTAAAGCTGTGGATGCTGCT
CTGAAGAAATATAACAGTCAAAACCAAAGTAACAACCAGTTTGTATTGTACCGCATAACTCAAGCCAC
TAAGACGGTTGGCTCTGACACGTTTTATTCCTTCAAGTACGAAATCAAGGAGGGCGATTGTCCTGTTC
AAAGTGGCAAAACCTGGCAGGACTGTGAGTACAAGGATGCTGCAAAAGCAGCCACTGGAGAATGCACG
GCAACCGTGGGGAAGAGGAGCAGTACGAAATTCTCCGTGGCTACCCAGACCTGCCAGATTACTCCACC
CGAGGGCCCTGTGGTGACAGCCCAGTACGACTGCCTCGGCTGTGTGCATCCTATATCAACGCAGAGCC
CAGACCTGGAGCCCATTCTGAGACACGGCATTCAGTACTTTAACAACAACACTCAACATTCCTCCCTC
TTCATGCTTAATGAAGTAAAACGGGCCCAAAGACAGGTGGTGGCTGGATTGAACTTTCGAATTACCTA
CTCAATTGTGCAAACGAATTGTTCCAAAGAGAATTTTCTGTTCTTAACTCCAGACTGCAAGTCCCTTT
GGAATGGTGATACCGGTGAATGTACAGATAATGCATACATCGATATTCAGCTACGAATTGCTTCCTTC
TCACAGAACTGTGACATTTATCCAGGGAAGGATTTTGTACAACCACCTACCAAGATTTGCGTGGGCTG
CCCCAGGGATATACCCACCAACAGCCCAGAGCTGGAGGAGACACTGACTCACACCATCACAAAGCTTA
ATGCAGAGAATAACGCAACTTTCTATTTCAAGATTGACAATGTGAAAAAAGCAAGAGTACAGGTGGTG
GCTGGCAAGAAATATTTTATTGACTTCGTGGCCAGGGAAACCACATGTTCCAAGCAAAGTAATGAAGA
GTTGACCGAAAGCTGTGAGACCAAAAAACTTGGCCAAAGCCTAGATTGCAACGCTGAAGTTTATGTG

| | | | |
|---|---|---|---|
| NOV1e, 308900326 | | | |
| Protein Sequence | SEQ ID NO: 10 | 357 aa | MW at 40027.4 kD |

MKLITILFLCSRLLLSLTOESOSEEIDCNDKDLFKAVDAALKKYNSONOSNNOFVLYRITEAT
KTVGSDTFYSFKYEIKEGDCPVQSGKTWQDCEYKDAAKAATGECTATVGKRSSTKFSVATQTCQITPA
EGPVVTAQYDCLGCVHPISTQSPDLEPILRHGIQYFNNNTQHSSLFMLNEVKBAQRQVVAGLNFRITY
SIVQTNCSKENFLFLTPDCKSLWNGDTGECTDNAYIDIQLRIASFSQNCDIYPGKDFVQPPTKICVGC
PRDIPTNSPELEETLTHTITKLNAENNATFYFKIDNVKKARVQVVAGKKYFIDFVARETTCSKESNEE
LTESCETKKLGQSLDCNAEVYV

| | | |
|---|---|---|
| NOV1f, 308900357 | SEQ ID NO: 11 | 729 bp |
| DNA Sequence | ORF Start: at 1 | ORF Stop: end of sequence |

GGTTTTTCACCTTTCCGATCATCACGAATAGGGGAAATAAAAGAAGAAACAACTGTAA
GTCCACCCCACACTTCCATGGCACCTGCACAAGATGAAGAGCGGGATTCAGGAAAAGAACAAGGGCAT
ACTCGTAGACATGACTGGGGCCATGAAAAACAAAGAAAACATAATCTTGGCCATGGCCATAAACATGA
ACGTGACCAAGGGCATGGGCACCAAAGAGGACATGGCCTTGGCCATGGACACGAACAACAGCATGGTC
TTGGTCATGGACATAAGTTCAAACTTCATGATGATCTTGAACACCAAGGGGGCCATGTCCTTGACCAT
GGACATAAGCATAAGCATGGTCATGGCCACGGAAAACATAAAAATAAAGGCAAAAAGAATGGAAAGCA
CAATGGTTGGAAAACAGAGCATTTGGCAAGCTCTTCTGAAGACAGTACTACACCTTCTGCACAGACAC
AAGAGAAGACAGAAGGGCCAACACCCATCCCTTCCCTAGCCAAGCCAGGTGTAACAGTTACCTTTTCT
GACTTTCAGGACTCTGATCTCATTGCAACTATGATGCCTCCTATATCACCAGCTCCCATACAGAGTGA
TGACGATTGGATCCCTGATATCCAGATAGACCCAAATGGCCTTTCATTTAACCCAATATCAGATTTTC
CAGACACGACCTCCCCAAAATGTCCTGGACGCCCCTGGAAGTCAGTTAGTGAAATTAAT

| | | | |
|---|---|---|---|
| NOV1f, 308900357 | | | |
| Protein Sequence | SEQ ID NO: 12 | 243 aa | MW at 26861.3 kD |

GFSPFRSSRIGEIKEETTVSPPHTSMAPAQDEERDSGKEQGHTRRHDWGHEKQRKHNLGHGHKHE
RDQGHGHQRGHGLGHGHEQQHGLGHGHKFKLDDDLEHQGGHVLDHGHKHKHGHGHGKHKNKGKKNGKH
NGWKTEHLASSSEDSTTPSAQTQEKTEGPTPIPSLAKPGVTVTFSDFQDSDLIATMMPPISPAPIQSD
DDWIPDIQIDPNGLSFNPISDFPDTTSPKCPGRPWKSVSEIN

| | | |
|---|---|---|
| NOV1g, 319687415 | SEQ ID NO: 13 | 1848 bp |
| DNA Sequence | ORF Start: at 1 | ORF Stop: end of sequence |

CCCACCGACTGCAATCACAAGGATTTATTTAAAGCTGTGGATGCTGCTCTGAAGAAAT
ATAACAGTCAAAACCAAAGTAACAACCAGTTTGTATTGTACCGCATAACTGAACCCACTAAGACGGTT
GGCTCTGACACGTTTTATTCCTTCAAGTACGAAATCAAGGAGGGGGATTGTCCTGTTCAAAGTGGCAA
AACCTGGCAGGACTGTGAGTACAAGGATGCTGCAAAAGCAGCCACTGGAGAATGCACGGCAACCGTGG
GGAAGAGGAGCAGTACGAAATTCTCCGTGGCTACCCAGACCTGCCAGATTACTCCAGCCGAGGGCCCT
GTGGTGACAGCCCAGTACGACTGCCTCGGCTGTGTGCATCCTATATCAACGCAGAGCCCAGACCTGGA
GCCCATTCTGAGACACGGCATTCAGTACTTTAACAACAACACTCAACATTCCTCCCTCTTCATGCTTA
ATGAAGTAAAACGGGCCCAAAGACAGGTGGTGGCTGGATTGAACTTTCGAATTACCTACTCAATTGTG
CAAACGAATTGTTCCAAAGAGAATTTTCTGTTCTTAACTCCAGACTGCAAGTCCCTTTGGAATGGTGA
TACCGGTGAATGTACAGATAATGCATACATCGATATTCAGCTACGAATTGCTTCCTTCTCACAGAACT
GTGACATTTATCCAGGGAAGGATTTTGTACAACCACCTACCAAGATTTGCGTGGGCTGCCCCAGGGAT
ATACCCACCAACAGCCCAGAGCTGGAGGAGACACTGACTCACACCATCACAAAGCTTAATGCAGAGAA
TAACGCAACTTTCTATTTCAAGATTGACAATGTGAAAAAAGCAAGAGTACAGGTGGTGGCTGGCAAGA
AATATTTTATTGACTTCGTGGCCAGGGAAACCACATGTTCCAAGGAAAGTAATGAAGAGTTGACCGAA
AGCTGTGAGACCAAAAAACTTGGCCAAAGCCTAGATTGCAACGCTGAAGTTTATGTGGTACCCTGGGA
GAAAAAAATTTACCCTACTGTCAACTGTCAACCACTGGGAATGATCTCACTGATGAAAAGGCCTCCAG
GTTTTTCACCTTTCCGATCATCACGAATAGGGGAAATAAAAGAAGAAACAACTGTAAGTCCACCCCAC
ACTTCCATGGCACCTGCACAAGATGAAGAGCGGGATTCAGGAAAAGAACAAGGGCATACTCGTAGACA
TCACTGGGGCCATGAAAAACAAAGAAAACATAATCTTGGCCATGGCCATAAACATGAACGTGACCAAG
GGCATGGGCACCAAACAGGACATGGCCTTGGCCATGGACACGAACAACAGCATGGTCTTGGTCATGGA
CATAAGTTCAAACTTGATGATGATCTTGAACACCAAGGGGGCCATGTCCTTGACCATGGACATAAGCA
TAAGCATGGTCATGGCCACGGAAAACATAAAAATAAAGGCAAAAAGAATGGAAAGCACAATGGTTGGA
AAACAGAGCATTTGGCAAGCTCTTCTGAAGACAGTACTACACCTTCTGCACAGACACAAGAGAAGACA
GAAGGGCCAACACCCATCCCTTCCCTAGCCAAGCCAGGTGTAACAGTTACCTTTTCTGACTTTCAGCA
CTCTGATCTCATTGCAACTATGATGCCTCCTATATCACCAGCTCCCATACAGAGTGATGACGATTGGA
TCCCTGATATCCAGATAGACCCAAATGGCCTTTCATTTAACCCAATATCAGATTTTCCAGACACGACC
TCCCCAAAATGTCCTGGACGCCCCTGGAAGTCAGTTAGTGAAATTAATCCAACCACACAAATGAAAGA
ATCTTATTATTTCGATCTCACT

| | | | |
|---|---|---|---|
| NOV1g, 319687415 | | | |
| Protein Sequence | SEQ ID NO: 14 | 616 aa | MW at 68791.8 kD |

PTDCNDKDLFKAVDAALKKYNSQNQSNNQFVLYRITEATKTVGSDTFYSFKYEIKEGDCPVQSGK
TWQDCEYKDAAKAATGECTATVGKRSSTKFSVATQTCQITPAEGPVVTAQYDCLGCVHPISTQSPDLE
PILRHGIQYFNNNTQHSSLFMLNEVKRAQRQVVAGLNFRITYSIVQTNCSKENFLFLTPDCKSLWNGD
TGECTDNAYIDIQLRIASFSQNCDIYPGKDFVQPPTKICVGCPRDIPTNSPELEETLTHTITKLNAEN
NATFYFKIDNVKKARVOVVAGKKYFIDFVARETTCSKESNEELTESCETKKLGOSLDCNAEVYVVPWE
KKIYPTVNCQPLGMISLMKRPPGFSPFRSSRIGEIKEETTVSPPHTSMAPAQDEERDSGKEQGHTRRH
DWGHEKQRKHNLGHGHKHERDQGHGHQRGHGLGHGHEQQHGLGHGHKFKLDDDLEHQGGHVLDHGHKH
KHGHGHGKHKNKGKKNGKHNGWKTEHLASSSEDSTTPSAQTQEKTEGPTPIPSLAKPGVTVTFSDFQD
SDLIATMMPPISPAPIQSDDDWIPDIQIDPNGLSFNPISDFPDTTSPKCPGRPWKSVSEINPTTQMKE
SYYFDLT

| | | |
|---|---|---|
| NOV1h, CG104903-10 | SEQ ID NO: 15 | 1863 bp |
| DNA Sequence | ORF Start: at 1 | ORF Stop: at 1863 |

GAGGAAATTGACTGCAATGACAAGGATTTATTTAAAGCTGTGGATGCTGCTCTGAAGAAATA
TAACAGTCAAAACCAAAGTAACAACCAGTTTGTATTGTACCGCATAACTGAAGCCACTAAGACGGTTG
GCTCTGACACGTTTTATTCCTTCAAGTACGAAATCAAGGAGGGGGATTGTCCTGTTCAAAGTGGCAAA
ACCTGCCAGGACTGTGAGTACAAGGATGCTGCAAAAGCAGCCACTGGAGAATGCACGGCAACCGTGGG
GAAGAGGAGCAGTACGAAATTCTCCGTGGCTACCCAGACCTGCCAGATTACTCCAGCCGAGGGCCCTG
TGGTGACAGCCCAGTACGACTGCCTCGGCTGTGTGCATCCTATATCAACGCAGAGCCCAGACCTGGAG
CCCATTCTGAGACACGGCATTCAGTACTTTAACAACAACACTCAACATTCCTCCCTCTTCATGCTTAA
TGAAGTAAAACGGGCCCAAAGACAGGTGGTGGCTGGATTGAACTTTCGAATTACCTACTCAATTGTGC
AAACGAATTGTTCCAAAGAGAATTTTCTGTTCTTAACTCCAGACTGCAAGTCCCTTTGGAATGGTGAT
ACCGGTGAATGTACAGATAATGCATACATCCATATTCAGCTACGAATTGCTTCCTTCTCACAGAACTG
TGACATTTATCCAGGGAAGGATTTTGTACAACCACCTACCAAGATTTGCCTGGGCTGCCCCAGGGATA
TACCCACCAACAGCCCAGAGCTGGAGGAGACACTGACTCACACCATCACAAAGCTTAATGCAGAGAAT
AACGCAACTTTCTATTTCAAGATTGACAATGTGAAAAAAGCAAGAGTACAGGTGGTGGCTGGCAAGAA
ATATTTTATTGACTTCGTGGCCAGGGAAACCACATGTTCCAAGGAAAGTAATGAAGAGTTGACCGAAA
GCTGTGAGACCAAAAAACTTGGCCAAAGCCTAGATTGCAACGCTGAAGTTTATGTGGTACCCTGGGAG
AAAAAAATTTACCCTACTGTCAACTCTCAACCACTGGGAATGATCTCACTGATGAAAAGGCCTCCAGG
TTTTTCACCTTTCCGATCATCACGAATAGGGGAAATAAAAGAAGAAACAACTGTAAGTCCACCCCACA
CTTCCATGGCACCTGCACAAGATGAAGAGCGGGATTCAGGAAAAGAACAAGGGCATACTCGTAGACAT
GACTGGGGCCATGAAAAACAAAGAAAACATAATCTTCGCCATGGCCATAAACATGAACGTGACCAAGC
GCATGGGCACCAAAGAGGACATGGCCTTGGCCATGGACACGAACAACAGCATGGTCTTGGTCATGGAC
ATAAGTTCAAACTTGATGATGATCTTGAACACCAAGGGGGCCATGTCCTTGACCATGGACATAAGCAT
AAGCATGGTCATGGCCACGGAAAACATAAAAATAAAGGCAAAAAGAATGGAAAGCACAATGGTTGGAA
AACAGAGCATTTGGCAAGCTCTTCTGAAGACAGTACTACACCTTCTGCACAGACACAAGAGAAGACAG
AAGCGCCAACACCCATCCCTTCCCTAGCCAAGCCAGGTGTAACAGTTACCTTTTCTGACTTTCAGGAC
TCTGATCTCATTGCAACTATGATGCCTCCTATATCACCAGCTCCCATACAGAGTGATGACGATTGGAT
CCCTGATATCCAGATAGACCCAAATGGCCTTTCATTTAACCCAATATCAGATTTTCCAGACACGACCT
CCCCAAAATGTCCTGGACGCCCCTGGAAGTCAGTTAGTGAAATTAATCCAACCACACAAATGAAAGAA
TCTTATTATTTCGATCTCACTGATGGCCTTTCT

| | | | |
|---|---|---|---|
| NOV1h, CG104903-10 | | | |
| Protein Sequence | SEQ ID NO: 16 | 621 aa | MW at 69336.6 kD |

EEIDCNDKDLFKAVDAALKKYNSQNQSNNQFVLYRITEATKTVGSDTFYSFKYEIKEGDCPVQSGKTW
QDCEYKDAAKAATGECTATVGKRSSTKFSVATQTCQITPAEGPVVTAQYDCLGCVHPISTQSPDLEPI
LRHGIQYFNNNTQHSSLFMLNEVKRAQRQVVAGLNFRITYSIVQTNCSKENFLFLTPDCKSLWNGDTG
ECTDNAYIDIQLRIASFSQNCDIYPGKDFVQPPTKICVGCPRDIPTNSPELEETLTHTTTKLNAENNA
TFYFKIDNVKKARVQVVAGKKYFIDFVARETTCSKESNEELTESCETKKLGQSLDCNAEVYVVPWEKK
IYPTVNCQPLGMISLMKRPPGFSPFRSSRIGEIKEETTVSPPHTSMAPAQDEERDSGKEQGHTRRHDW
GHEKQRKHNLCHGHKHERDQGHGHQRGHGLGHGHEQQHGLGHGHKFKLDDDLEHQGGHVLDHGHKHKH
GHGHGKHKNKGKKNGKHNGWKTEHLASSSEDSTTPSAQTQEKTEGPTPIPSLAKPGVTVTFSDFQDSD
LIATMMPPISPAPIQSDDDWIPDIQIDPNGLSFNPISDFPDTTSPKCPGRPWKSVSEINPTTQMKESY
YFDLTDGLS

| | | |
|---|---|---|
| NOV1i, 311750024 | SEQ ID NO: 17 | 1866 bp |
| DNA Sequence | ORF Start: at 1 | ORF Stop: end of sequence |

TCTGAGGAAATTGACTGCAATGACAAGGATTTATTTAAAGCTGTGGATGCTGCTCTGAAGA
AATATAACAGTCAAAACCAAAGTAACAACCAGTTTGTATTGTACCGCATAACTGAAGCCACTAAGACC
GTTGGCTCTGACACGTTTTATTCCTTCAAGTACGAAATCAAGGAGGGGGATTGTCCTGTTCAAAGTGG
CAAAACCTGGCAGGACTGTGAGTACAAGGATGCTGCAAAAGCAGCCACTGGAGAATGCACGGCAACCG
TGGGGAAGAGGAGCAGTACGAAATTCTCCGTGGCTACCCAGACCTGCCAGATTACTCCAGCCGAGGGC
CCTGTCGTGACAGCCCAGTACGACTGCCTCGGCTGTGTGCATCCTATATCAACGCAGAGCCCAGACCT
GGAGCCCATTCTGAGACACGGCATTCAGTACTTTAACAACAACACTCAACATTCCTCCCTCTTCATGC
TTAATGAAGTAAAACGGGCCCAAAGACAGGTGGTGGCTGGATTGAACTTTCGAATTACCTACTCAATT
GTGCAAACCAATTGTTCCAAAGAGAATTTTCTGTTCTTAACTCCAGACTGCAAGTCCCTTTGGAATGG
TGATACCGGTGAATGTACAGATAATGCATACATCGATATTCAGCTACGAATTGCTTCCTTCTCACAGA
ACTGTGACATTTATCCAGGGAAGGATTTTGTACAACCACCTACCAAGATTTGCGTGGGCTGCCCCAGG
GATATACCCACCAACAGCCCAGAGCTGGAGGAGACACTGACTCACACCATCACAAAGCTTAATGCAGA
GAATAACGCAACTTTCTATTTCAAGATTGACAATGTGAAAAAAGCAAGAGTACAGGTGGTGGCTGGCA
AGAAATATTTTATTGACTTCGTGGCCAGGGAAACCACATGTTCCAAGGAAAGTAATGAAGAGTTGACC
GAAAGCTGTGAGACCAAAAAACTTGGCCAAAGCCTAGATTGCAACGCTGAAGTTTATGTGGTACCCTG
GGAGAAAAAAATTTACCCTACTGTCAACTGTCAACCACTGGGAATGATCTCACTGATGAAAAGGCCTC
CAGGTTTTTCACCTTTCCGATCATCACGAATAGGGGAAATAAAAGAAGAAACAACTGTAAGTCCACCC
CACACTTCCATGGCACCTGCACAAGATGAAGAGCGGGATTCAGGAAAAGAACAAGGGCATACTCGTAG
ACATGACTGGGGCCATGAAAAACAAAGAAAACATAATCTTGGCCATGGCCATAAACATGAACGTGACC
AAGGGCATGGGCACCAAAGAGGACATGGCCTTGGCCATGGACACGAACAACAGCATGGTCTTGGTCAT
GGACATAAGTTCAAACTTGATGATGATCTTGAACACCAAGGGGGCCATGTCCTTGACCATGGACATAA
GCATAAGCATGGTCATGGCCACGGAAAACATAAAAATAAAGGCAAAAAGAATGGAAAGCACAATGGTT
GGAAAACAGAGCATTTGGCAAGCTCTTCTGAAGACAGTACTACACCTTCTGCACAGACACAAGAGAAG
ACAGAAGGGCCAACACCCATCCCTTCCCTAGCCAAGCCAGGTGTAACAGTTACCTTTTCTGACTTTCA
GGACTCTGATCTCATTGCAACTATGATGCCTCCTATATCACCAGCTCCCATACAGAGTGATGACGATT
GGATCCCTGATATCCAGATAGACCCAAATGGCCTTTCATTTAACCCAATATCAGATTTTCCAGACACG
ACCTCCCCAAAATGTCCTGGACGCCCCTGGAAGTCAGTTAGTGAAATTAATCCAACCACACAAATGAA
AGAATCTTATTATTTCGATCTCACTGATGGCCTTTCT

| | | | |
|---|---|---|---|
| NOV1i, 311750024 | | | |
| Protein Sequence | SEQ ID NO: 18 | 622 aa | MW at 69424.4 kD |

SEEIDCNDKDLFKAVDAALKKYNSQNQSNNQFVLYRITEATKTVGSDTFYSFKYEIKEGDCPVQSG
KTWQDCEYKDAAKAATGECTATVGKRSSTKFSVATQTCQITPAEGPVVTAQYDCLGCVHPISTQSPDL
EPILRHGIQYFNNNTQHSSLFMLNEVKRAQRQVVAGLNFRITYSIVQTNCSKENFLFLTPDCKSLWNG
DTGECTDNAYIDIQLRIASFSQNCDIYPGKDFVQPPTKICVGCPRDIPTNSPELEETLTHTITKLNAE
NNATFYFKIDNVKKARVQVVAGKKYFIDFVARETTCSKESNEELTESCETKKLGQSLDCNAEVYVVPW
EKKIYPTVNCQPLGMISLMKRPPGFSPFRSSRIGEIKEETTVSPPHTSMAPAQDEERDSGKEQGHTRR
HDWGHEKQRKHNLGHGHKHERDQGHGHQRGHGLGHGHEQQHGLGHGHKFKLDDDLEHQGGHVLDHGHK
HKHGHGHGKHKNKGKKNGKHNGWKTEHLASSSEDSTTPSAQTQEKTEGPTPIPSLAKPGVTVTFSDFQ
DSDLIATMMPPISPAPIQSDDDWIPDIQIDPNGLSFNPISDFPDTTSPKCPGRPWKSVSEINPTTQMK
ESYYFDLTDGLS

| | | |
|---|---|---|
| NOV1j, CG104903-01 | SEQ ID NO: 19 | 1357 bp |
| DNA Sequence | ORF Start: ATG at 1 | ORF Stop: TGA at 1195 |

ATGAAACTAATTACCATCCTTTTCCTCTGCTCCAGGCTACTACTAAGTTTAACCCAGGAATCACAGTC
CGAGGAAATTGATGACTGCAATGACAAGGATTTATTTAAAGCTGTGGATGCTGCTCTGAAGAAATATA
ACAGTCAAAACCAAAGTAACAACCAGTTTGTATTGTACCGCAAAACCTGGCAGGACTGTGAGTACAAG
GATGCTGCAAAAGCAGCCACTGGAGAATGCACAGCAACCGTGGGGAAGAGGAGCAGTACGAAATTCTC
CGTGGCTACCCAGACCTGGCAGATTACTCCAGCCGAGGGCCCTGTGGTGACAGCCCAGTACGACTGCC
TCGGCTGTGTGCATCCTATATCAACGCAGAGCCCAGACCTGGAGCCCATTCTGAGACACGGCATTCAG
TACTTTAACAACAACACTCAACATTCCTCCCTCTTCACGCTTAATGAAGTAAAACGGGCCCAAAGACA
GGTGGTGGCTGGATTGAACTTTCGAATTACCTACTCAATTGTGCAAACGAATTGTTCCAAAGAGAATT
TTCTGTTCTTAACTCCAGACTGCAAGTCCCTTTGGAATGGTGATACCGGTGAATGTACAGATAATGCA
TACATCGATATTCAGCTACGAATTGCTTCCTTCTCACAGAACTGTGACATTTATCCAGGGAAGGATTT
TGTACAACCACCTACCAAGATTTGCGTGGGCTGCCCCAGAGATATACCCACCAACAGCCCAGAGCTGG
AGGAGACACTGACTCACACCATCACAAAGCTTAATGCAGAGAATAACGCAACTTTCTATTTCAAGATT
GACAATGTGAAAAAAGCAAGAGTACAGGTGGTGGCTGGCAAGAAATATTTTATTGACTTCGTGGCCAG
GGAAACCACATGTTCCAAGGAAAGTAATGAAGAGTTGACCGAAAGCTGTGAGACCAAAAAACTTGGCC
AAAGCCTAGATTGCAACGCTGAAGTTTATGTGGTACCCTGGGAGAAAAAAATTTACCCTACTGTCAAC
TGTCAACCACTGGGAATGATCTCACTGATCAAAAGGCCTCCAGGTTTTTCACCTTTCCGATCATCACG
AATAGGGGAAATAAAAGAAGAAACAACTAGTCACCTAAGGTCCTGCGAGTACAAGGGTCGACCCCCAA
AGGCAGGGGCAGAGCCAGCATCTGAGAGGGAGGTCTCTTGACCAATGGGCAGAATCTTCACTCCAGGC
ACATAGCCCGAACCACCTCTGCCAGCAACCTTGAGAGGAAGGACAAGAAGAAAGATGCGATAGAATTT
AAATAGAGAAGAATGCCATTTTATCACTCTGCCTCTGGGTGAAATAAAGATCAGTCTTGATGTTC

| | | | |
|---|---|---|---|
| NOV1j, CG104903-01 | | | |
| Protein Sequence | SEQ ID NO: 20 | 398 aa | MW at 44684.1 kD |

MKLITILFLCSRLLLSLTQESQSEEIDDCNDKDLFKAVDAALKKYNSQNQSNNQFVLYRKTWQDCEYK
DAAKAATGECTATVGKRSSTKFSVATQTCQITPAEGPVVTAQYDCLGCVHPISTQSPDLEPILRHGIQ
YFNNNTQHSSLFTLNEVKRAQRQVVAGLNFRITYSIVQTNCSKENFLFLTPDCKSLWNGDTGECTDNA
YIDIQLRIASFSQNCDIYPGKDFVQPPTKICVGCPRDIPTNSPELEETLTHTITKLNAENNATFYFKI
DNVKKARVQVVAGKKYFIDFVARETTCSKESNEELTESCETKKLGQSLDCNAEVYVVPWEKKIYPTVN
CQPLGMISLMKRPPGFSPFRSSRIGEIKEETTSHLRSCEYKCRPPKAGAEPASEREVS

| | | |
|---|---|---|
| NOV1k, CG104903-02 | SEQ ID NO: 21 | 1848 bp |
| DNA Sequence | ORF Start: ATG at 1 | ORF Stop: TAA at 1846 |

ATGAAACTAATTACCATCCTTTTCCTCTGCTCCAGGCTACTACTAAGTTTAACCCAGGAATCACAGTC
CGAGGAAATTGATGACTGCAATGACAAGGATTTATTTAAAGCTGTCGATGCTGCTCTGAAGAAATATA
ACAGTCAAAACCAAAGTAACAACCAGTTTGTATTGTACCGCAAAACCTGGCAGGACTGTGAGTACAAG
GATGCTGCAAAAGCACCCACTGGAGAATGCACAGCAACCGTGGGGAAGAGGAGCAGTACGAAATTCTC
CGTGGCTACCCAGACCTGCCAGATTACTCCAGCCGAGGGCCCTGTGGTGACAGCCCAGTACGACTGCC
TCGGCTGTGTGCATCCTATATCAACGCAGAGCCCAGACCTGGAGCCCATTCTGAGACACGGCATTCAG
TACTTTAACAACAACACTCAACATTCCTCCCTCTTCACGCTTAATGAAGTAAAACGGGCCCAAAGACA
GGTGGTGGCTGGATTGAACTTTCGAATTACCTACTCAATTGTGCAAACGAATTGTTCCAAAGAGAATT
TTCTGTTCTTAACTCCAGACTGCAAGTCCCTTTGGAATGGTGATACCGGTGAATGTACAGATAATGCA
TACATCGATATTCAGCTACGAATTGCTTCCTTCTCACAGAACTGTCACATTTATCCAGGGAAGGATTT
TGTACAACCACCTAGCAAGATTTGCGTGGGCTGCCCCAGAGATATACCCACCAACAGCCCAGAGCTGG
AGGAGACACTGACTCACACCATCAACAAGCTTAATGCAGAGAATAACGCAACTTTCTATTTCAAGATT
GACAATGTGAAAAAAGCAAGAGTACAGGTGGTGGCTGGCAAGAAATATTTTATTGACTTCGTGGCCAG
GGAAACCACATGTTCCAAGGAAAGTAATGAAGAGTTGACCGAAAGCTGTGAGACCAAAAAACTTGGCC
AAAGCCTAGATTGCAACGCTGAAGTTTATGTGGTACCCTGGGAGAAAAAAATTTACCCTACTGTCAAC
TGTCAACCACTGGGAATGATCTCACTGATGAAAAGGCCTCCAGGTTTTTCACCTTTCCGATCATCACG
AATAGGGGAAATAAAAGAAGAAACAACTGTAAGTCCACCCCACACTTCCATGGCACCTGCACAAGATG
AAGAGCGGGATTCAGGAAAAGAACAAGGGCATACTCGTAGACATGACTGGGGCCATGAAAAACAAAGA
AAACATAATCTTGGCCATGGCCATAAACATGAACGTGACCAAGGGCATGGGCACCAAAGAGGACATGG
CCTTGGCCATGGACACGAACAACAGCATGGTCTTGGTCATGGACATAAGTTCAAACTTGATGATGATC
TTGAACACCAAGGGGGCCATGTCCTTGACCATGGACATAAGCATAAGCATGGTCATGGCCACGGAAAA
CATAAAAATAAAGGCAAAAACAATGGAAAGCACAATGGTTGGAAAACAGAGCATTTGGCAACCTCTTC
TGAAGACAGTACTACACCTTCTGCACAGACACAAGAGAAGACAGAAGGGCCAACACCCATCCCTTCCC
TAGCCAAGCCAGGTGTAACAGTTACCTTTTCTGACTTTCAGGACTCTGATCTCATTGCAACTATGATG
CCTCCTATATCACCAGCTCCCATACAGAGTGATGACGATTCGATCCCTGATATCCAGACAGACCCAAA
TGGCCTTTCATTTAACCCAATATCAGATTTTCCAGACACGACCTCCCCAAAATGTCCTGGACGCCCCT
GGAAGTCAGTTAGTGAAATTAATCCAACCACACAAATGAAAGAATCTTATTATTTCGATCTCACTGAT
GGCCTTTCTTAA

| | | | |
|---|---|---|---|
| NOV1k, CG104903-02 | | | |
| Protein Sequence | SEQ ID NO: 22 | 615 aa | MW at 68746.1 kD |

MKLITILFLCSRLLLSLTQESQSEEIDDCNDKDLFKAVDAALKKYNSQNQSNNQFVLYRKTWQDCEYK
DAAKAATGECTATVGKRSSTKFSVATQTCQITPAEGPVVTAQYDCLGCVHPISTQSPDLEPILRHGIQ
YFNNNTQHSSLFTLNEVKRAQRQVVAGLNFRITYSIVQTNCSKENFLFLTPDCKSLWNGDTGECTDNA
YIDIQLRIASFSQNCDIYPGKDFVQPPTKICVGCPRDIPTNSPELEETLTHTITKLNAENNATFYFKI
DNVKKARVQVVAGKKYFIDFVARETTCSKESNEELTESCETKKLGQSLDCNAEVYVVPWEKKIYPTVN
CQPLGMISLMKRPPGFSPFRSSRIGEIKEETTVSPPHTSMAPAQDEERDSGKEQGHTRRHDWGHEKQR
KHNLGHGHKHERDQGHGHQRGHGLGHGHEQQHGLGHGHKFKLDDDLEHQGGHVLDHGHKHKHGHGHGK
HKNKGKKNGKHNGWKTEHLASSSEDSTTPSAQTQEKTEGPTPIPSLAKPGVTVTFSDFQDSDLIATMM
PPISPAPIQSDDDWIPDIQTDPNGLSFNPISDFPDTTSPKCPGRPWKSVSEINPTTQMKESYYFDLTD
GLS

| | | |
|---|---|---|
| NOV1l, CG104903-04 | SEQ ID NO: 23 | 1380 bp |
| DNA Sequence | ORF Start: ATG at 3 | ORF Stop: TGA at 1284 |

TCATGAAACTAATTACCATCCTTTTCCTCTGCTCCAGGCTGCTACTAAGTTTAACCCAGGAATCACAG
TCCGAGGAAATTGACTGCAATGACAAGGATTTATTTAAAGCTGTGGATGCTGCTCTGAAGAAATATAA
CAGTCAAAACCAAAGTAACAACCAGTTTGTATTGTACCGCATAACTGAAGCCACTAAGACGGTTGGCT
CTGACACGTTTTATTCCTTCAAGTACGAAATCAAGGAGGGGGATTGTCCTGTTCAAAGTGGCAAAACC
TGGCAGGACTGTGAGTACAAGGATGCTGCAAAAGCAGCCACTGGAGAATGCACGGCAACCGTGGGGAA
GAGGAGCAGTACGAAATTCTCCGTGGCTACCCAGACCTGCCAGATTACTCCAGCCGAGGGCCCTGTGG
TGACAGCCCAGTACGACTGCCTCCGCTGTGTGCATCCTATATCAACGCAGAGCCCAGACCTGGAGCCC
ATTCTGAGACACGGCATTCAGTACTTTAACAACAACACTCAACATTCCTCCCTCTTCATGCTTAATGA
AGTAAAACGGGCCCAAAGACAGGTGGTGGCTGGATTGAACTTTCGAATTACCTACTCAATTGTGCAAA
CGAATTGTTCCAAAGAGAATTTTCTGTTCTTAACTCCAGACTGCAAGTCCCTTTGGAATGGTGATACC
GGTGAATGTACAGATAATGCATACATCGATATTCAGCTACGAATTGCTTCCTTCTCACAGAACTGTGA
CATTTATCCAGGGAAGGATTTTGTACAACCACCTACCAAGATTTGCGTGGGCTGCCCCAGAGATATAC
CCACCAACAGCCCAGAGCTGGAGGAGACACTGACTCACACCATCACAAAGCTTAATGCAGAGAATAAC
GCAACTTTCTATTTCAAGATTGACAATGTGAAAAAAGCAAGAGTACAGGTGGTGGCTGGCAAGAAATA
TTTTATTGACTTCGTGGCCAGGGAAACCACATGTTCCAAGGAAAGTAATGAAGAGTTGACCGAAAGCT
GTGAGACCAAAAAACTTGGCCAAAGCCTAGATTGCAACGCTGAAGTTTATGTGGTACCCTGGGAGAAA
AAAATTTACCCTACTGTCAACTGTCAACCACTGGGAATGATCTCACTGATGAAAAGGCCTCCAGGTTT
TTCACCTTTCCGATCATCACGAATAGGGGAAATAAAAGAAGAAACAACTAGTCACCTAAGGTCCTGCG
AGTACAAGGGTCGACCCCCAAAGGCAGGGGCAGAGCCAGCATCTGAGAGGGAGGTCTCTTGACCAATC
GGCAGAATCTTCACTCCAGGCACATAGCCCCAACCACCTCTGCCAGCAACCTTGAGAGGAAGGACAAG
AAGAAAGATGGGATAGAATT

| | | | |
|---|---|---|---|
| NOV1l, CG104903-04 | | | |
| Protein Sequence | SEQ ID NO: 24 | 427 aa | MW at 47882.7 kD |

MKLITILFLCSRLLLSLTQESQSEEIDCNDKDLFKAVDAALKKYNSQNQSNNQFVLYRITEATKTVGS
DTFYSFKYEIKEGDCPVQSGKTWQDCEYKDAAKAATGECTATVGKRSSTKFSVATQTCQITPAEGPVV
TAQYDCLGCVHPISTQSPDLEPILRHGIQYFNNNTQHSSLFMLNEVKRAQRQVVAGLNFRITYSIVQT
NCSKENFLFLTPDCKSLWNGDTGECTDNAYIDIQLRIASFSQNCDIYPCKDFVQPPTKICVGCPRDIP
TNSPELEETLTHTITKLNAENNATFYFKIDNVKKARVQVVAGKKYFIDFVARETTCSKESNEELTESC
ETKKLGQSLDCNAEVYVVPWEKKIYPTVNCQPLGMISLMKRPPGFSPFRSSRIGEIKEETTSHLRSCE
YKGRPPKAGAEPASEREVS

| | | |
|---|---|---|
| NOV1m, CG104903-05 | SEQ ID NO: 25 | 1297 bp |
| DNA Sequence | ORF Start: ATG at 50 | ORF Stop: TAA at 1295 |

AATTCCGGTTGAAACCATCCCTCAGCTCCTAGAGGGAGATTGTTAGATCATGAAACTAATTACCATCC
TTTTCCTCTGCTCCAGGCTACTACTAAGTTTAACCCAGGAATCACAGTCCGAGGAAATTGACTGCAAT
GACAAGGATTTATTTAAAGCTGTGGATGCTGCTCTGAAGAAATATAACAGTCAAAACCAAAGTAACAA
CCAGTTTGTATTGTAGCGCATAACTGAAGCCACTAAGACGGTTGGCTCTGACACGTTTTATTGCTTCA
AGTACGAAATCAAGGAGGGGGATTGTCCTGTTCAAAGTCGCAAAACCTGGCAGGACTGTGAGTACAAG
GATGCTGCAAAAGCAGCCACTGGAGAATGCACAGCAACCGTGGGGAAGAGGAGCACTACGAAATTCTC
CGTGGCTACCCAGACCTGCCAGATTACTCCAGCCGAGGGCCCTCTGGTGACAGCCCAGTACGACTGCC
TCGGCTGTGTGCATCCTATATCAACGCAGAGCCCAGGTTTTTCACCTTTCCGATCATCACGAATAGGG
GAAATAAAAGAAGAAACAACTGTAAGTCCACCCCACACTTCCATGGCACCTGCACAAGATGAAGAGCG
GGATTCAGGAAAAGAACAAGGGCATACTCGTAGACATGACTGGGGCCATGAAAAACAAAGAAAACATA
ATCTTGGCCATGGCCATAAACATGAACGTGACCAAGGGCATGGGCACCAAAGAGGACATGGCCTTGGC
CATGGACACGAACAACAGCATGGTCTTGGTCATGGACATAAGTTCAAACTTGATGATGATCTTGAACA
CCAAGGGGGCCATGTCCTTGACCATGGACATAAGCATAAGCATGGTCATGGCCACGGAAAACATAAAA
ATAAAGGCAAAAAGAATGGAAAGCACAATGGTTGGAAAACAGAGCATTTGGCAAGCTCTTCTGAAGAC
AGTACTACACCTTCTGCACAGACACAAGAGAAGACAGAAGCGCCAACACCCATCCCTTCCCTAGCCAA
GCCAGGTGTAACAGTTACCTTTTCTGACTTTCAGGACTCTGATCTCATTGCAACTATGATGCCTCCTA
TATCACCAGCTCCCATACAGAGTGATGACGATTGGATCCCTGATATCCAGATAGACCCAAATCGCCTT
TCATTTAACCCAATATCAGATTTTCCAGACACGACCTCCCCAAAATGTCCTGGACGCCCCTGGAAGTC
AGTTAGTGAAATTAATCCAACCACACAAATGAAAGAATCTTATTATTTCGATCTCACTGATGGCCTTT
CTTAA

| | | | |
|---|---|---|---|
| NOV1m, CG104903-05 | | | |
| Protein Sequence | SEQ ID NO: 26 | 415 aa | MW at 45897.3 kD |

MKLITILFLCSRLLLSLTQESQSEEIDCNDKDLFKAVDAALKKYNSQNQSNNQFVLYRITEATKTVGS
DTFYSFKYEIKEGDCPVQSGKTWQDCEYKDAAKAATGECTATVGKRSSTKFSVATQTCQITPAEGPVV
TAQYDCLGCVHPISTQSPGFSPFRSSRIGEIKEETTVSPPHTSMAPAQDEERDSGKEQGHTRRHDWGH
EKQRKHNLGHGHKHERDQGHGHQRGHGLGHGHEQQHGLGHGHKFKLDDDLEHQGGHVLDHGHKHKHGH
GHGKHKNKGKKNGKHNGWKTEHLASSSEDSTTPSAQTQEKTEGPTPIPSLAKPGVTVTFSDFQDSDLI
ATMMPPISPAPIQSDDDWTPDIQIDPNGLSFNPISDFPDTTSPKCPGRPWKSVSEINPTTQMKESYYF
DLTDGLS

| | | |
|---|---|---|
| NOV1n, CG104903-06 | SEQ ID NO: 27 | 1892 bp |
| DNA Sequence | ORF Start: ATG at 50 | ORF Stop: TAA at 458 |

AATTCCGGTTGAAACCATCCCTCAGCTCCTAGAGGGAGATTGTTAGATCATGAAACTAATTACCATCC
TTTTCCTCTGCTCCAGGCTACTACTAAGTTTAACCCAGGAATCACAGTCCGAGGAAATTGACTGCAAT
GACAAGGATTTATTTAAAGCTGTGGATGCTGCTCTGAAGAAATATAACAGTCAAAACCAAAGTAACAA
CCAGTTTGTATTGTACCGCATAACTGAAGCCACTAAGACGGTTGGCTCTGACACGTTTTATTCCTTCA
AGTACGAAATCAAGGAGGGGGATTGTCCTGTTCAAAGTGGCAAAACCTGGCAGGACTGTGAGTACAAC
GATGCTGCAAAAGCAGCCACTGGAGAATGCACAGCAACCGTGGGAAGAGGAGCAGTACGAAATTCTCC
GTGGCTACCCAGACCTGGAGCCCATTCTGAGACACGGCATTCAGTACTTTAACAACAACACTCAACAT
TCCTCCCTCTTCACGCTTAATGAAGTAAAACGGGCCCAAAGACAGGTGGTGGCTGGATTGAACTTTCG
AATTACCTACTCAATTGTGCAAACGAATTGTTCCAAAGAGAATTTTCTGTTCTTAACTCCAGACTGCA
AGTCCCTTTGGAATGGTGATACCGGTGAATGTACAGATAATGCATACATCGATATTCAGCTACGAATT
GCTTCCTTCTCACAGAACTGTGACATTTATCCAGGGAAGGATTTTGTACAACCACCTACCAAGATTTG
CGTGGGCTGCCCCAGAGATATACCCACCAACAGCCCAGAGCTGGAGGAGACACTGACTCACACCATCA
CAAAGCTTAATGCAGAGAATAACGCAACTTTCTATTTCAAGATTGACAATGTGAAAAAAGCAAGACTA
CAGGTGGTGGCTGGCAAGAAATATTTTATTGACTTCGTGGCCAGGGAAACCACATGTTCCAAGGAAAG
TAATGAACAGTTGACCCAAAGCTGTGAGACCAAAAAACTTGGCCAAAGCCTAGATTGCAACGCTGAAG
TTTATGTGGTACCCTGGGAGAAAAAAATTTACCCTACTGTCAACTGTCAACCACTGGGAATGATCTCA
CTGATGAAAAGGCCTCCAGGTTTTTCACCTTTCCGATCATCACGAATAGGGGAAATAAAAGAAGAAAC
AACTGTAAGTCCACCCCACACTTCCATGGCACCTGCACAAGATGAAGAGCGGGATTCAGGAAAAGAAC
AAGGGCATACTCGTAGACATGACTGGGGCCATGAAAAACAAAGAAAACATAATCTTGGCCATGGCCAT
AAACATGAACGTCACCAAGGGCATGGGCACCAAAGAGGACATGGCCTTGGCCATGGACACGAACAACA
GCATGGTCTTGGTCATGGACATAAGTTCAAACTTGATGATGATCTTGAACACCAAGGGGGCCATGTCC
TTGACCATGGACATAAGCATAAGCATGGTCATGGCCACGGAAAACATAAAAATAAAGGCAAAAAGAAT
GGAAAGCACAATGGTTGGAAAACAGAGCATTTGGCAAGCTCTTCTGAAGACAGTACTACACCTTCTGC
ACAGACACAAGAGAAGACAGAAGGGCCAACACCCATCCCTTCCCTAGCCAAGCCAGGTGTAACAGTTA
CCTTTTCTGACTTTCAGGACTCTGATCTCATTGCAACTATGATGCCTCCTATATCACCAGCTCCCATA
CAGAGTGATGACGATTGGATCCCTGATATCCAGATAGACCCAAATGGCCTTTCATTTAACCCAATATC
AGATTTTCCAGACACGACCTCCCCAAAATGTCCTGGACGCCCCTGGAAGTCACTTAGTGAAATTAATC
CAACCACACAAATGAAAGAATCTTATTATTTCGATCTCACTGATGGCCTTTCTTAA

| | | | |
|---|---|---|---|
| NOV1n, CG104903-06 | | | |
| Protein Sequence | SEQ ID NO: 28 | 136 aa | MW at 15218.9 kD |

MKLITILFLCSRLLLSLTQESQSEEIDCNDKDLFKAVDAALKKYNSQNQSNNQFVLYRITEATKTVGS
DTFYSFKYEIKEGDCPVQSGKTWQDCEYKDAAKAATGECTATVGRGAVRNSPWLPRPGAHSETRHSVL

| | | |
|---|---|---|
| NOV1o, CG104903-07 | SEQ ID NO: 29 | 670 bp |
| DNA Sequence | ORF Start: ATG at 1 | ORF Stop: TGA at 508 |

ATGAAACTAATTACCATCCTTTTCCTCTGCTCCAGGCTACTACTAAGTTTAACCCAGGAATCACAGTC
CGAGGAAATTGATGACTGCAATGACAAGCATTTATTTAAAGCTGTGGATGCTGCTCTGAAGAAATATA
ACAGTCAAAACCAAAGTAACAACCAGTTTGTATTGTACCGCAAAACCTGGCAGGACTGTGAGTACAAG
GATGCTGCAAAAGCAGCCACTGGAGAATGCACAGCAACCGTGGGGAACAGGAGCAGTACGAAATTCTC
CGTGGCTACCCAGACCTGCCAGATTACTCCAGCCGAGGGCCCTGTGGTGACAGCCCAGTACGACTGCC
TCGGCTGTGTGCATCCTATATCAACGCAGAGCCCAGGTTTTTCACCTTTCCGATCATCACGAATAGGG
GAAATAAAAGAAGAAACAACTAGTCACCTAAGGTCCTGCGAGTACAAGGGTCGACCCCCAAAGGCAGG
GGCAGAGCCAGCATCTGAGAGGCAGGTCTCTTGACCAATGGGCAGAATCTTCACTCCAGGCACATAGC
CCCAACCACCTCTGCCAGCAACCTTGAGAGGAAGGACAAGAAGAAAGATGGGATAGAATTTAAATAGA
GAAGAATGCCATTTTATCACTCTGCCTCTGGGTGAAATAAAGATCAGTCTTGATGTTC

| | | | |
|---|---|---|---|
| NOV1o, CG104903-07 | | | |
| Protein Sequence | SEQ ID NO: 30 | 169 aa | MW at 18654.7 kD |

MKLITILFLCSRLLLSLTQESQSEEIDDCNDKDLFKAVDAALKKYNSQNQSNNQFVLYRKTWQDCEYK
DAAKAATGECTATVGKRSSTKFSVATQTCQITPAEGPVVTAQYDCLGCVHPISTQSPGFSPFRSSRIG
EIKEETTSHLRSCEYKGRPPKAGAEPASEREVS

| | | |
|---|---|---|
| NOV1p, CG104903-08 | SEQ ID NO: 31 | 1193 bp |
| DNA Sequence | ORF Start: ATG at 1 | ORF Stop: TGA at 1171 |

ATGAAACTAATTACCATCCTTTTCCTCTGCTCCAGGCTACTACTAAGTTTAACCCAGGAATCACAGTC
CGAGGAAATTGACTGCAATGACAAGGATTTATTTAAAGCTGTGGATGCTGCTCTGAAGAAATATAACA
GTCAAAACCAAAGTAACAACCAGTTTGTATTGTACCGCATAACTGAAGCCACTAAGACGGCCACTGGA
GAATGCACGGCAACCGTGGGGAAGAGGAGCAGTACGAAATTCTCCGTGGCTACCCAGACCTGCCAGAT
TACTCCAGCCGAGGGCCCTGTGGTGACAGCCCAGTACGACTGCCTCGGCTGTGTGCATCCTATATCAA
CGCAGAGCCCAGACCTGCAGCCCATTCTGAGACACGGCATTCAGTACTTTAACAACAACACTCAACAT
TCCTCCCTCTTCACGCTTAATGAAGTAAAACGGGCCCAAAGACACGTGGTGGCTGGATTGAACTTTCG
AATTACCTACTCAATTGTGCAAACGAATTGTTCCAAAGAGAATTTTCTGTTCTTAACTCCAGACTGCG
AGTCCCTTTGGAATGGTGATACCGGTGAATGTACAGATAATGCATACATCGATATTCAGCTACGAATT
GCTTCCTTCTCACAGAACTGTGACATTTATCCAGGGAAGGATTTTGTACAACCACCTACCAAGATTTG
CGTGGGCTGCCCCAGAGATATACCCACCAACAGCCCAGAGCTGGAGGAGACACTGACTCACACCATCA
CAAAGCTTAATGCAGAGAATAACGCAACTTTCTATTTCAAGATTGACAATGTGAAAAAAGCAAGAGTA
CAGGTGGTGGCTCGCAAGAAATATTTTATTGACTTCGTGGCCAGGGAAACCACATGTTCCAAGGAAAG
TAATGAAGAGTTGACCGAAAGCTGTGAGACCAAAAAACTTGGCCAAAGCCTAGATTGCAACGCTGAAG
TTTATGTGGTACCCTGGGAGAAAAAAATTTACCCTACTGTCAACTGTCAACCACTGGGAATGATCTCA
CTGATGAAAAGGCCTCCAGGTTTTTCACCTTTCCGATCATCACGAATAGGGGAAATAAAAGAAGAAAC
AACTAGTCACCTAAGGTCCTGCGAGTACAAGGGTCGACCCCCAAAGGCAGGCGCAGAGCCAGTATCTG
AGAGGGAGGTCTCTTGACCAATGGGCAGAATCTTCAC

| | | | |
|---|---|---|---|
| NOV1p, CG104903-08 | | | |
| Protein Sequence | SEQ ID NO: 32 | 390 aa | MW at 43704.0 kD |

MKLITILFLCSRLLLSLTQESQSEEIDCNDKDLFKAVDAALKKYNSQNQSNNQFVLYRITEATKTATG
ECTATVGKRSSTKFSVATQTCQITPAEGPVVTAQYDCLGCVHPISTQSPDLEPILRHGIQYFNNNTQH
SSLFTLNEVKRAQRQVVAGLNFRITYSIVQTNCSKENFLFLTPDCESLWNGDTGECTDNAYIDIQLRI
ASFSQNCDIYPGKDFVQPPTKICVGCPRDTPTNSPELEETLTHTITKLNAENNATFYFKIDNVKKARV
QVVAGKKYFIDFVARETTCSKESNEELTESCETKKLGQSLDCNAEVYVVPWEKKIYPTVNCQPLGMIS
LMKRPPGFSPFRSSRIGEIKEETTSHLRSCEYKGRPPKAGAEPVSEREVS

| | | |
|---|---|---|
| NOV1q, CG104903-11 | SEQ ID NO: 33 | 48 bp |
| DNA Sequence | ORF Start: at 1 | ORF Stop: end of sequence |

CATAAAAATAAAGGCAAAAAGAATGGAAAGCACAATGGTTGGAAAACA

| | | | |
|---|---|---|---|
| NOV1q, CG104903-11 | | | |
| Protein Sequence | SEQ ID NO: 34 | 16 aa | MW at 1862.2 kD |

| | |
|---|---|
| HKNKGKKNGKHNGWKT | +TZ,46 |

| | | |
|---|---|---|
| NOV1r, CG104903-12 | SEQ ID NO: 35 | 48 bp |
| DNA Sequence | ORF Start: at 1 | ORF Stop: end of sequence |

AAGCATGGTCATGGCCACGGAAAACATAAAAATAAAGGCAAAAAGAAT

| | | | |
|---|---|---|---|
| NOV1r, CG104903-12 | | | |
| Protein Sequence | SEQ ID NO: 36 | 16 aa | MW at 1792.1 kD |

KHGHGHGKHKNKGKKN

| | | |
|---|---|---|
| NOV1s, CG104903-13 | SEQ ID NO: 37 | 48 bp |
| DNA Sequence | ORF Start: at 1 | ORF Stop: end of sequence |

GTCCTTGACCATGGACATAAGCATAAGCATGGTCATGGCCACGGAAAA

| NOV1s, CG104903-13 | | | |
|---|---|---|---|
| Protein Sequence | SEQ ID NO: 38 | 16 aa | MW at 1781.0 kD |
| VLDHGHKHKHGHGHGK | | | |

| | | |
|---|---|---|
| NOV1t, CG104903-14 | SEQ ID NO: 39 | 48 bp |
| DNA Sequence | ORF Start: at 1 | ORF Stop: end of sequence |

GGACATGGCCTTGGCCATGGACACGAACAACAGCATGGTCTTGGTCAT

| | | | |
|---|---|---|---|
| NOV1t, CG104903-14 | | | |
| Protein Sequence | SEQ ID NO: 40 | 16 aa | MW at 1657.8 kD |

GHGLGHGHEQQHGLGH

| | | |
|---|---|---|
| NOV1u, CG104903-15 | SEQ ID NO: 41 | 48 bp |
| DNA Sequence | ORF Start: at 1 | ORF Stop: end of sequence |

GACCAAGGGCATGGGCACCAAAGAGGACATGGCCTTGGCCATGGACAC

| | | | |
|---|---|---|---|
| NOV1u, CG104903-15 | | | |
| Protein Sequence | SEQ ID NO: 42 | 16 aa | MW at 1686.8 kD |

DQGHGHQRGHGLGHGH

| | | |
|---|---|---|
| NOV1v, CG104903-16 | SEQ ID NO: 43 | 1863 bp |
| DNA Sequence | ORF Start: at 1 | ORF Stop: at 1863 |

GAGGAATTGACTGCAATGACAAGGATTTATTTAAAGCTGTGGATGCTGCTCTGAAGA
AATATAACAGTCAAAACCAAAGTAACAACCAGTTTGTATTGTACCGCATAACTGAAGCCACTAAGACG
GTTGGCTCTGACACGTTTTATTCCTTCAAGTACGAAATCAAGGAGGGGGATTGTCCTGTTCAAAGTGG
CAAAACCTGGCAGGACTGTGAGTACAAGGATGCTGCAAAAGCAGCCACTGGAGAATGCACGGCAACCG
TGGGGAAGAGGAGCAGTACGAAATTCTCCGTGGCTACCCAGACCTGCCAGATTACTCCAGCCGAGGGC
CCTGTGGTGACAGCCCAGTACGACTGCCTCGGCTGTGTGCATCCTATATCAACGCAGAGCCCAGACCT
GGAGCCCATTCTGAGACACGGCATTCAGTACTTTAACAACAACACTCAACATTCCTCCCTCTTCATGC
TTAATGAAGTAAAACGGGCCCAAAGACAGGTGGTGGCTGGATTGAACTTTCGAATTACCTACTCAATT
GTGCAAACGAATTGTTCCAAAGAGAATTTTCTGTTCTTAACTCCAGACTGCAAGTCCCTTTGGAATGG
TGATACCGGTGAATGTACAGATAATGCATACATCGATATTCAGCTACGAATTGCTTCCTTCTCACAGA
ACTCTGACATTTATCCAGGGAAGGATTTTGTACAACCACCTACCAAGATTTGCGTGGGCTGCCCCAGG
GATATACCCACCAACAGCCCAGAGCTGGAGGAGACACTGACTCACACCATCACAAAGCTTAATGCAGA
GAATAACGCAACTTTCTATTTCAAGATTGACAATGTGAAAAAAGCAAGAGTACAGCTGGTGGCTGGCA
AGAAATATTTTATTGACTTCGTGGCCAGGGAAACCACATGTTCCAAGGAAAGTAATGAAGACTTGACC
GAAAGCTGTGAGACCAAAAAACTTGGCCAAAGCCTAGATTGCAACGCTGAAGTTTATGTGGTACCCTG
GGAGAAAAAAATTTACCCTACTGTCAACTGTCAACCACTGGCAATGATCTCACTGATGAAAAGGCCTC
CAGGTTTTTCACCTTTCCCATCATCACGAATAGCGGAAATAAAAGAAGAAACAACTGTAAGTCCACCC
CACACTTCCATGGCACCTGCACAACATGAAGAGCGGGATTCAGGAAAAGAACAAGGGCATACTCGTAG
ACATGACTGGGGCCATGAAAAACAAAGAAAACATAATCTTGGCCATGGCCATAAACATGAACGTGACC
AAGGGCATGGGCACCAAAGAGGACATGGCCTTGGCCATGGACACGAACAACAGCATGGTCTTGGTCAT
GGACATAAGTTCAAACTTGATGATGATCTTGAACACCAAGGGGGCCATGTCCTTGACCATGGACATAA
GCATAAGCATGGTCATGGCCACGGAAAACATAAAAATAAAGGCAAAAAGAATGGAAAGCACAATGGTT
GGAAAACAGAGCATTTGGCAAGCTCTTCTGAAGACAGTACTACACCTTCTGCACAGACACAAGAGAAG
ACAGAAGGGCCAACACCCATCCCTTCCCTAGCCAAGCCAGGTGTAACAGTTACCTTTTCTGACTTTCA
GGACTCTGATCTCATTGCAACTATGATGCCTCCTATATCACCAGCTCCCATACAGAGTGATGACGATT
GGATCCCTGATATCCAGATAGACCCAAATGGCCTTTCATTTAACCCAATATCAGATTTTCCAGACACG
ACCTCCCCAAAATGTCCTGGACGCCCCTGGAAGTCAGTTAGTGAAATTAATCCAACCACACAAATGAA
AGAATCTTATTATTTCGATCTCACTGATGGCCTTTCT

| | | | |
|---|---|---|---|
| NOV1v, CG104903-16 | | | |
| Protein Sequence | SEQ ID NO: 44 | 621 aa | MW at 69336.6 kD |

EEIDCNDKDLFKAVDAALKKYNSQNQSNNQFVLYRITEATKTVGSDTFYSFKYETKEGDCPVQSGKTW
QDCEYKDAAKAATGECTATVGKRSSTKFSVATQTCQITPAEGPVVTAQYDCLGCVHPISTQSPDLEPI
LRHGIQYFNNNTQHSSLFMLNEVKRAQRQVVAGLNFRITYSIVQTNCSKENFLFLTPDCKSLWNGDTG
ECTDNAYIDIQLRIASFSQNCDIYPGKDFVQPPTKICVGCPRDIPTNSPELEETLTHTITKLNAENNA
TFYFKIDNVKKARVQWAGKKYFIDFVARETTCSKESNEELTESCETKKLGQSLDCNAEVYVVNPWEKK
IYPTVNCQPLGMISLMKRPPGFSPFRSSRIGEIKEETTVSPPHTSMAPAQDEERDSGKEQGHTRRHDW
GHEKQRKHNLGHGHKHERDQGHGHQRGHGLGHGHEQQHGLGHCHKFKLDDDLEHQGGHVLDHGHKHKH
GHGHGKHKNKGKKNGKHNGWKTEHLASSSEDSTTPSAQTQEKTEGPTPIPSLAKPGVTVTFSDFQDSD
LIATMMPPISPAPIQSDDDWIPDIQIDPNGLSFNPISDFPDTTSPKCPGRPWKSVSETNPTTQMKESY
YFDLTDGLS

| | | |
|---|---|---|
| NOV1w, CG104903-17 | SEQ ID NO: 45 | 1071 bp |
| DNA Sequence | ORF Start: ATG at 1 | ORF Stop: at 1071 |

ATGAAACTAATTACCATCCTTTTCCTCTGCTCCAGGCTACTACTAAGTTTAA
CCCAGGAATCACAGTCCGAGGAAATTGACTGCAATGACAAGGATTTATTTAAAGCTGTGGATGCTGCT
CTGAAGAAATATAACAGTCAAAACCAAAGTAACAACCAGTTTGTATTGTACCGCATAACTGAAGCCAC
TAAGACGGTTGGCTCTGACACGTTTTATTCCTTCAAGTACGAAATCAAGGAGGGGGATTCTCCTGTTC
AAAGTGGCAAAACCTGGCAGGACTGTGAGTACAAGGATGCTGCAAAAGCAGCCACTGGAGAATGCACG
GCAACCGTGCGGAAGAGGAGCAGTACGAAATTCTCCGTGGCTACCCAGACCTGCCAGATTACTCCAGC
CGAGGGCCCTGTGGTGACAGCCCAGTACGACTGCCTCGGCTGTGTGCATCCTATATCAACGCAGAGCC
CAGACCTGGAGCCCATTCTGAGACACGGCATTCAGTACTTTAACAACAACACTCAACATTCCTCCCTC
TTCATGCTTAATGAAGTAAAACGGGCCCAAAGACAGGTGGTGGCTGGATTGAACTTTCGAATTACCTA
CTCAATTGTGCAAACGAATTGTTCCAAAGAGAATTTTCTGTTCTTAACTCCAGACTGCAAGTCCCTTT
GGAATGGTGATACCGGTGAATGTACAGATAATGCATACATCGATATTCAGCTACGAATTGCTTCCTTC
TCACAGAACTGTGACATTTATCCAGGGAAGGATTTTGTACAACCACCTACCAAGATTTGCGTCGGCTG
CCCCAGGGATATACCCACCAACAGCCCAGAGCTGGAGGAGACACTGACTCACACCATCACAAAGCTTA
ATGCAGAGAATAACGCAACTTTCTATTTCAAGATTGACAATGTGAAAAAAGCAAGAGTACAGGTGGTG
GCTGGCAAGAAATATTTTATTGACTTCGTGGCCAGGGAAACCACATGTTCCAAGGAAAGTAATGAAGA
GTTGACCGAAAGCTGTGACACCAAAAAACTTGGCCAAAGCCTAGATTGCAACGCTGAAGTTTATGTG

| | | | |
|---|---|---|---|
| NOV1w, CG104903-17 | | | |
| Protein Sequence | SEQ ID NO: 46 | 357 aa | MW at 40026.7 kD |

MKLITILFLCSRLLLSLTQESQSEEIDCNDKDLFKAVDAALKKYNSQNQSNNQFVLYRITEATKTVGS
DTFYSFKYEIKEGDCPVQSGKTWQDCEYKDAAKAATGECTATVGKRSSTKFSVATQTCQITPAEGPVV
TAQYDCLGCVHPISTQSPDLEPILRHGIQYFNNNTQHSSLFMLNEVKRAQRQVVAGLNFRITYSIVQT
NCSKENFLFLTPDCKSLWNGDTGECTDNAYIDIQLRTASFSQNCDIYPGKDFVQPPTKICVGCPRDIP
TNSPELEETLTHTITKLNAENNATFYFKIDNVKKARVQVVAGKKYFIDFVARETTCSKESNEELTESC
ETKKLGQSLDCNAEVYV

| | | |
|---|---|---|
| NOV1x, CG104903-18 | SEQ ID NO: 47 | 327 bp |
| DNA Sequence | ORF Start: at 1 | ORF Stop: at 327 |

GCACCTGCACAAGATGAAGAGCGGGATTCAGGAAAAGAACAAGGGCATACTCGTAGAC
ATGACTGGGGCCATGAAAAACAAAGAAAACATAATCTTGGCCATGGCCATAAACATGAACGTCACCAA
GGGCATGGGCACCAAAGAGGACATGGCCTTGGCCATGGACACGAACAACAGCATGGTCTTGGTCATGG
ACATAAGTTCAAACTTGATGATGATCTTGAACACCAAGGGGGCCATGTCCTTGACCATGGACATAAGC
ATAAGCATGGTCATGGCCACGGAAAACATAAAAATAAAGGCAAAAAGAATGGAAAGCACAATGGT

| | | | |
|---|---|---|---|
| NOV1x, CG104903-18 | | | |
| Protein Sequence | SEQ ID NO: 48 | 109 aa | MW at 12335.3 kD |

APAQDEERDSGKEQGHTRRHDWGHEKQRKHNLGHGHKHERDQGHGHQRGHGLGHGHEQQHGLCHGHKF
KLDDDLEHQGGHVLDHGHKHKHGHGHGKHKNKGKKNGKHNG

| | | |
|---|---|---|
| NOV1y, CG104903-19 | SEQ ID NO: 49 | 729 bp |
| DNA Sequence | ORF Start: at 1 | ORF Stop: at 729 |

GGTTTTTCACCTTTCCGATCATCACGAATAGGGGAAATAAAAGAAGAAACAACTGTAA
GTCCACCCCACACTTCCATGGCACCTGCACAAGATGAAGAGCGGGATTCAGGAAAAGAACAAGGGCAT
ACTCGTAGACATGACTGGGGCCATGAAAAACAAAGAAAACATAATCTTGGCCATGGCCATAAACATGA
ACGTGACCAAGGGCATGGGCACCAAAGAGGACATGGCCTTGGCCATGGACACGAACAACAGCATGGTC
TTGGTCATGGACATAAGTTCAAACTTGATGATGATCTTGAACACCAAGGGGGCCATGTCCTTGACCAT
GGACATAAGCATAAGCATGGTCATGGCCACGGAAAACATAAAAATAAAGGCAAAAAGAATGGAAAGCA
CAATGGTTGGAAAACAGAGCATTTGGCAAGCTCTTCTGAAGACAGTACTACACCTTCTGCACAGACAC
AACAGAAGACAGAAGGGCCAACACCCATCCCTTCCCTAGCCAAGCCAGGTGTAACAGTTACCTTTTCT
GACTTTCAGGACTCTGATCTCATTGCAACTATGATGCCTCCTATATCACCAGCTCCCATACAGAGTGA
TGACGATTGGATCCCTGATATCCAGATAGACCCAAATGGCCTTTCATTTAACCCAATATCAGATTTTC
CAGACACGACCTCCCCAAAATGTCCTGGACGCCCCTGGAAGTCACTTAGTGAAATTAAT

| | | | |
|---|---|---|---|
| NOV1y, CG104903-19 | | | |
| Protein Sequence | SEQ ID NO: 50 | 243 aa | MW at 26861.2 kD |

GFSPFRSSRIGEIKEETTVSPPHTSMAPAQDEERDSGKEQGHTRRHDWGHEKQRKHNLGHGHKHERDQ
GHGHQRGHGLGHGHEQQHGLGHGHKFKLDDDLEHQGGHVLDHGHKHKHGHGHGKHKNKGKKNGKHNGW
KTEHLASSSEDSTTPSAQTQEKTEGPTPIPSLAKPGVTVTFSDFQDSDLIATMMPPISPAPIQSDDDW
IPDIQIDPNGLSFNPISDFPDTTSPKCPGRPWKSVSEIN

| | | |
|---|---|---|
| NOV1z, CG104903-20 | SEQ ID NO: 51 | 1935 bp |
| DNA Sequence | ORF Start: ATG at 1 | ORF Stop: TAG at 1935 |

ATGAAACTAATTACCATCCTTTTCCTCTGCTCCAGGCTACTACTAAGTTTAAC
CCAGGAATCACAGTCCGAGGAAATTGACTCCAATGACAAGGATTTATTTAAAGCTGTGGATCCTGCTC
TGAAGAAATATAACAGTCAAAACCAAAGTAACAACCAGTTTGTATTGTACCGCATAACTGAAGCCACT
AAGACGGTTGGCTCTGACACGTTTTATTCCTTCAAGTACGAAATCAAGGAGGGGGACTGTCCTGTTCA
AAGTGGCAAAACCTGGCAGGACTGTGAGTACAAGGATGCAGCAAAAGCAGCCACTGGAGAATGCACGG
CAACCGTGGGGAAGAGGAGCAGTACGAAATTCTCCGTGGCTACCCAGACCTGCCAGATTACTCCAGCC
GAGGGCCCTGTGGTGACAGCCCAGTACGACTGCCTCGGCTGTGTGCATCCTATATCAACGCAGAGCCC
AGACCTGGAGCCCATTCTGAGACACGGCATTCAGTACTTTAACAACAACACTCAACATTCCTCCCTCT
TCACGCTTAATGAAGTAAAACGGGCCCAAAGACAGGTGGTGGCTGGATTGAACTTTCGAATTACCTAC
TCAATTGTGCAAACGAATTGTTCCAAAGAGAATTTTGTGTTCTTAACTCCAGACTGCAAGTCCCTTTG
GAATGGTGATACCGGTGAATGTACAGATAATGCATACATCGATATTCAGCTACGAATTGCTTCCTTCT
CACAGAACTGTGACATTTATCCAGGGAAGGATTTTGTACAACCACCTACCAAGATTTGCGTGGGCTGC
CCCAGAGATATACCCACCAACAGCCCAGAGCTGGAGGAGACACTGACTCACACCATCACAAAGCTTAA
TCCAGAGAATAACGCAACTTTCTATTTCAAGATTGACAATGTGAAAAAAGCAAGAGTACAGGTGGTGG
CTGGCAAGAAATATTTTATTGACTTCGTGGCCAGGGAAACCACATGTTCCAAGGAAAGTAATGAAGAG
TTGACCGAAAGCTGTGAGACCAAAAAACTTGGCCAAAGCCTAGATTGCAACGCTGAAGTTTATGTCGT
ACCCTGGGAGAAAAAAATTTACCCTACTGTCAACTGTCAACCACTGGGAATGATCTCACTGATGAAAA
GGCCTCCAGGTTTTTCACCTTTCCGATCATCACGAATAGGGGAAATAAAAGAAGAAACAACTGTAAGT
CCACCCCACACTTCCATGGCACCTGCACAAGATGAAGAGCGGGATTCAGGAAAAGAACAAGGGCATAC
TCGTAGACATGACTGGGGCCATGAAAAACAAAGAAAACATAATCTTGGCCATGGCCATAAACATGAAC
GTGACCAAGGGCATGGGCACCAAAGAGGACATGGCCTTGGCCATGGACACGAACAACAGCATGGTCTT
GGTCATGGACATAAGTTCAAACTTGATGATGATCTTGAACACCAAGGCGGCCATGTCCTTGACCATGG
ACATAAGCATAAGCATGGTCATGGCCACGGAAAACATAAAAATAAAGGCAAAAAGAATGGAAAGCACA
ATGGTTGGAAAACAGAGCATTTGGCAAGCTCTTCTGAAGACAGTACTACACCTTCTGCACAGACACAA
GAGAAGACAGAAGGGCCAACACCCATCCCTTCCCTAGCCAAGCCAGGTGTAACAGTTACCTTTTCTGA
CTTTCAGGACTCTGATCTCATTGCAACTATGATGCCTCCTATATCACCAGCTCCCATACAGAGTGATG
ACGATTGGATCCCTGATATCCAGATAGACCCAAATGGCCTTTCATTTAACCCAATATCAGATTTTCCA
GACACGACCTCCCCAAAATGTCCTGGACGCCCCTGGAAGTCAGTTAGTGAAATTAATCCAACCACACA
AATGAAAGAATCTTATTATTTCGATCTCACTGATGGCCTTTCTTAG

| | | | |
|---|---|---|---|
| NOV1z, CG104903-20 | | | |
| Protein Sequence | SEQ ID NO: 52 | 644 aa | MW at 71926.7 kD |

[sequence omitted]

| | | |
|---|---|---|
| | SEQ ID NO: 53 | 1981 bp |
| NOV1aa, SNP13381566 of | ORF Start: ATG at 50 | ORF Stop: end of sequence |
| CG104903-03, DNA Sequence | SNP Pos: 105 | SNP Change: A to G |

AATTCCGGTTGAAACCATCCCTCAGCTCCTAGAGGGAGATTGTTAGATCATGAAACTAATTACCATCC
TTTTCCTCTGCTCCAGGCTACTACTAAGTTTAACCCGGGAATCACAGTCCGAGGAAATTGACTGCAAT
GACAAGGATTTATTTAAAGCTGTGGATGCTGCTCTGAAGAAATATAACAGTCAAAACCAAAGTAACAA
CCAGTTTGTATTGTACCGCATAACTGAAGCCACTAAGACGGTTGGCTCTGACACGTTTTATTCCTTCA
AGTACGAAATCAAGGAGGGGGATTGTCCTGTTCAAAGTGGCAAAACCTGGCAGGACTGTGAGTACAAG
GATGCTGCAAAAGCAGCCACTGGAGAATGCACGGCAACCGTGGGGAAGAGGAGCAGTACGAAATTCTC
CGTGGCTACCCAGACCTGCCACATTACTCCAGCCGACGGCCCTGTGGTGACACCCCAGTACGACTGCC
TCGGCTGTGTGCATCCTATATCAACCCAGAGCCCAGACCTGGAGCCCATTCTGAGACACGGCATTCAG
TACTTTAACAACAACACTCAACATTCCTCCCTCTTCATGCTTAATGAAGTAAAACGGGCCCAAAGACA
GGTGGTGGCTGGATTGAACTTTCGAATTACCTACTCAATTGTGCAAACGAATTGTTCCAAAGAGAATT
TTCTGTTCTTAACTCCAGACTGCAAGTCCCTTTGGAATGGTGATACCGGTGAATGTACAGATAATGCA
TACATCGATATTCAGCTACGAATTGCTTCCTTCTCACAGAACTGTGACATTTATCCAGGGAAGGATTT
TGTACAACCACCTACCAAGATTTGCGTGGGCTGCCCCAGAGATATACCCACCAACAGCCCAGAGCTGG
AGGAGACACTGACTCACACCATCACAAAGCTTAATGCAGAGAATAACGCAACTTTCTATTTCAAGATT
GACAATGTGAAAAAAGCAACAGTACAGGTGGTGGCTGGCAAGAAATATTTTATTGACTTCGTGGCCAG
GGAAACCACATGTTCCAAGGAAAGTAATGAAGAGTTGACCGAAAGCTGTCAGACCAAAAAACTTGGCC
AAAGCCTAGATTGCAACGCTGAAGTTTATGTGGTACCCTGGGAGAAAAAAATTTACCCTACTGTCAAC
TGTCAACCACTGGGAATGATCTCACTGATGAAAAGGCCTCCAGGTTTTTCACCTTTCCGATCATCACG
AATAGGGGAAATAAAAGAAGAAACAACTGTAAGTCCACCCCACACTTCCATGGCACCTGCACAAGATG
AAGAGCGGGATTCAGGAAAAGAACAAGGGCATACTCGTAGACATGACTGGGGCCATGAAAAACAAAGA
AAACATAATCTTGGCCATGGCCATAAACATGAACGTGACCAACGGCATGGGCACCAAAGAGGACATGG
CCTTGGCCATGGACACGAACAACAGCATGGTCTTGGTCATGGACATAAGTTCAAACTTGATGATGATC
TTGAACACCAAGGGGGCCATGTCCTTGACCATGGACATAAGCATAAGCATGGTCATGCCCACGGAAAA
CATAAAAATAAAGGCAAAAAGAATGGAAAGCACAATCGTTGGAAAACAGAGCATTTGGCAAGCTCTTC
TGAAGACAGTACTACACCTTCTGCACAGACACAAGAGAACACAGAAGGGCCAACACCCATCCCTTCCC
TAGCCAAGCCAGGTGTAACAGTTACCTTTTCTGACTTTCAGGACTCTGATCTCATTGCAACTATGATG
CCTCCTATATCACCAGCTCCCATACAGAGTGATGACGATTGGATCCCTGATATCCAGATAGACCCAAA
TGGCCTTTCATTTAACCCAATATCAGATTTTCCAGACAGGACCTCCCCAAAATGTCCTGGACGCCCCT
GGAAGTCAGTTAGTGAAATTAATCCAACCACACAAATGAAAGAATCTTATTATTTCGATCTCACTGAT
GGCCTTTCT

| | | | |
|---|---|---|---|
| NOV1aa, SNP13381566 of | SEQ ID NO: 54 | | MW at 71984.8 kD |
| CG104903-03, Protein Sequence | SNP Pos: 19 | 644 aa | SNP Change: Gln to Arg |

MKLITILFLCSRLLLSLTRESQSEEIDCNDKDLFKAVDAALKKYNSQNQSNNQFVLYRITEATKTVGS
DTFYSFKYEIKEGDCPVQSGKTWQDCEYKDAAKAATGECTATVGKRSSTKFSVATQTCQITPAEGPVV
TAQYDCLGCVHPISTQSPDLEPTLRHCIQYFNNNTQHSSLFMLNEVKRAQRQVVAGLNFRITYSIVQT
NCSKENFLFLTPDCKSLWNGDTGECTDNAYIDIQLRIASFSQNCDIYPGKDFVQPPTKICVGCPRDIP
TNSPELEETLTHTITKLNAENNATFYFKIDNVKKARVQVVAGKKYFTDFVARETTCSKESNEELTESC
ETKKLGQSLDCNAEVYVVPWEKKIYPTVNCQPLGMISLMKRPPGFSPFRSSRIGEIKEETTVSPPHTS
MAPAQDEERDSGKEQGHTRRHDWCHEKQRKHNLGHGHKHERDQGHGHQRGHGLGHGHEQQHGLGHGHK
FKLDDDLEHQGCHVLDHGHKHKHGHGHGKHKNKGKKNGKHNGWKTEHLASSSEDSTTPSAQTQEKTEG
PTPIPSLAKPGVTVTFSDFQDSDLIATMMPPISPAPIQSDDDWIPDIQTDPNGLSFNPISDFPDTTSP
KCPGRPWKSVSEINPTTQMKESYYFDLTDGLS

| | | |
|---|---|---|
| | SEQ ID NO: 55 | 1981 bp |
| NOV1ab, SNP13379157 of | ORF Start: ATG at 50 | ORF Stop: end of sequence |
| CG104903-03, DNA Sequence | SNP Pos: 253 | SNP Change: T to C |

AATTCCGGTTGAAACCATCCCTCAGCTCCTAGAGGGAGATTGTTAGATCATGAAACTAATTACCATCC
TTTTCCTCTGCTCCAGGCTACTACTAAGTTTAACCCAGGAATCACAGTCCGAGGAAATTGACTGCAAT
GACAAGGATTTATTTAAAGCTGTGGATGCTGCTCTGAAGAAATATAACAGTCAAAACCAAAGTAACAA
CCAGTTTGTATTGTACCGCATAACTGAAGCCACTAAGACGGTTGGCTCCGACACGTTTTATTCCTTCA
ACTACGAAATCAAGGAGGGGGATTGTCCTGTTCAAAGTGGCAAAACCTGGCAGGACTGTGAGTACAAG
GATGCTGCAAAAGCAGCCACTGGAGAATGCACGGCAACCGTGGGGAAGAGGAGCAGTACGAAATTGTC
CGTGGCTACCCAGACCTGCCAGATTACTCCAGCCGAGGGCCCTGTGGTGACAGCCCAGTACGACTGCC
TCGGCTGTGTGCATCCTATATCAACGCAGAGCCCAGACCTGGAGCCCATTCTGAGACACGGCATTCAG
TACTTTAACAACAACACTCAACATTCCTCCCTCTTCATGCTTAATGAAGTAAAACGGGCCCAAAGACA
GGTGGTGGCTGGATTGAACTTTCGAATTACCTACTCAATTGTGCAAACGAATTGTTCCAAAGAGAATT
TTCTGTTCTTAACTCCAGACTGCAAGTCCCTTTGGAATGGTGATACCGGTGAATGTACAGATAATGCA
TACATCGATATTCAGCTACGAATTGCTTCCTTCTCACAGAACTGTGACATTTATCCAGGGAAGGATTT
TGTACAACCACCTACCAAGATTTGCGTGGGCTGCCCCAGAGATATACCCACCAACAGCCCAGAGCTGG
AGGAGACACTGACTCACACCATCACAAAGCTTAATGCAGAGAATAACGCAACTTTCTATTTCAAGATT
GACAATGTGAAAAAAGCAAGAGTACAGGTGGTGGCTGGCAAGAAATATTTTATTGACTTCGTGGCCAG
GGAAACCACATGTTCCAAGGAAAGTAATGAAGAGTTGACCGAAAGCTGTGAGACCAAAAAACTTGGCC
AAAGCCTAGATTGCAACGCTGAAGTTTATGTGGTACCCTGGGAGAAAAAAATTTACCCTACTGTCAAC
TGTCAACCACTGGGAATGATCTCACTGATGAAAAGGCCTCCAGGTTTTTCACCTTTCCGATCATCACG
AATAGGGGAAATAAAAGAAGAAACAACTGTAAGTCCACCCCACACTTCCATGGCACCTGCACAAGATG
AAGAGCGGGATTCAGGAAAAGAACAAGGGCATACTCGTAGACATGACTGGGGCCATGAAAAACAAAGA
AAACATAATCTTGGCCATGGCCATAAACATGAACGTGACCAAGGGCATGCGCACCAAAGAGGACATGG
CCTTGGCCATGGACACGAACAACAGCATGGTCTTGGTCATGGACATAAGTTCAAACTTGATGATGATC
TTGAACACCAAGGGGGCCATGTCCTTGACCATGGACATAAGCATAAGCATGGTCATGGCCACGGAAAA
CATAAAAATAAAGGCAAAAAGAATGGAAAGCACAATGGTTGGAAAACAGAGCATTTGGCAAGCTCTTC
TGAAGACAGTACTACACCTTCTGCACAGACACAAGAGAAGACAGAAGGGCCAACACCCATCCCTTCCC
TAGCCAAGCCAGGTGTAACAGTTACCTTTTCTGACTTTCAGGACTCTGATCTCATTGCAACTATGATG
CCTCCTATATCACCAGCTCCCATACAGAGTGATGACGATTGGATCCCTGATATCCAGATAGACCCAAA
TGGCCTTTCATTTAACCCAATATCAGATTTTCCAGACACGACCTCCCCAAAATGTCCTGGACGCCCCT
GGAAGTCAGTTAGTGAAATTAATCCAACCACACAAATGAAAGAATCTTATTATTTCGATCTCACTGAT
GGCCTTTCT

| | | | |
|---|---|---|---|
| NOV1ab, SNP13379157 of | SEQ ID NO: 56 | | MW at 71956.8 kD |
| CG104903-03, Protein Sequence | SNP Pos: 68 | 644 aa | SNP Change: Ser to Ser |

MKLITILFLCSRLLLSLTQESQSEEIDCNDKDLFKAVDAALKKYNSQNQSNNQFVLYRITEATKTVGS
DTFYSFKYEIKEGDCPVQSGKTWQDCEYKDAAKAATGECTATVGKRSSTKFSVATQTCQITPAEGPVV
TAQYDCLGCVHPISTQSPDLEPILRHCIQYFNNNTQHSSLFMLNEVKEAQRQVVAGLNFRITYSIVQT
NCSKENFLFLTPDCKSLWNGDTGECTDNAYIDIQLRIASFSQNCDIYPGKDFVQPFTKICVGCPRDIP
TNSPELEETLTHTITKLNAENNATFYFKIDNVKKARVQVVAGKKYFIDFVARETTCSKESNEELTESC
ETKKLGQSLDCNAEVYVVPWEKKIYPTVNCQPLGMISLMKRPPGFSPFRSSRIGEIKEETTVSPPHTS
MAPAQDEERDSGKEQGHTRRHDWGHEKQRKHNLGHGHKHERDQGHGHQRGHGLGHGHEQQHGLGHGHK
FKLDDDLEHQGGHVLDHGHKHKHGHGHGKHKNKGKKNGKHNGWKTEHLASSSEDSTTPSAQTQEKTEG
PTPIPSLAKPGVTVTFSDFQDSDLIATMMPPISPAPIQSDDDWIPDIQIDPNGLSFNPISDFPDTTSP
KCPGRPWKSVSEINPTTQMKESYYFDLTDGLS

| | | |
|---|---|---|
| | SEQ ID NO: 57 | 1981 bp |
| NOV1ac, SNP13379158 of | ORF Start: ATG at 50 | ORF Stop: end of sequence |
| CG104903-03, DNA Sequence | SNP Pos: 295 | SNP Change: T to C |

AATTCCGGTTGAAACCATCCCTCAGCTCCTAGAGGGAGATTGTTAGATCATGAAACTAATTACCATCC
TTTTCCTCTGCTCCAGGCTACTACTAAGTTTAACCCAGGAATCACAGTCCGAGGAAATTGACTGCAAT
GACAAGGATTTATTTAAAGCTGTGGATGCTGCTCTGAAGAAATATAACAGTCAAAACCAAAGTAACAA
CCAGTTTGTATTGTACCGCATAACTGAAGCCACTAAGACGGTTGGCTCTGACACGTTTTATTCCTTCA
AGTACGAAATCAAGGAGGGGGACTGTCCTGTTCAAAGTGGCAAAACCTGGCAGGACTGTCAGTACAAG
GATGCTGCAAAAGCAGCCACTGGAGAATGCACGGCAACCGTGGGGAAGAGGAGCAGTACGAAATTCTC
CGTGGCTACCCAGACCTGCCAGATTACTCCAGCCGAGGGCCCTGTGGTGACAGCCCAGTACGACTGCC
TCGGCTGTGTGCATCCTATATCAACGCAGAGCCCAGACCTGGAGCCCATTCTGAGACACGGCATTCAG
TACTTTAACAACAACACTCAACATTCCTCCCTCTTCATGCTTAATGAAGTAAAACGGGCCCAAAGACA
GGTGGTGGCTGGATTGAACTTTCGAATTACCTACTCAATTGTGCAAACGAATTGTTCCAAAGAGAATT
TTCTGTTCTTAACTCCAGACTGCAAGTCCCTTTGGAATGGTGATACCCGTGAATGTACAGATAATGCA
TACATCGATATTCAGCTACGAATTGCTTCCTTCTCACAGAACTGTGACATTTATCCAGGGAAGCATTT
TGTACAACCACCTACCAAGATTTGCGTGGGCTGCCCCAGAGATATACCCACCAACAGCCCAGAGCTGG
AGGAGACACTGACTCACACCATCACAAAGCTTAATGCAGAGAATAACGCAACTTTCTATTTCAAGATT
GACAATGTGAAAAAAGCAAGAGTACAGGTGGTGCCTGGCAAGAAATATTTTATTGACTTCGTGGCCAG
GGAAACCACATGTTCCAAGGAAAGTAATGAAGAGTTGACCGAAAGCTGTGAGACCAAAAAACTTGGCC
AAAGCCTAGATTGCAACGCTGAAGTTTATGTGGTACCCTGGGAGAAAAAAATTTACCCTACTGTCAAC
TGTCAACCACTGGGAATGATCTCACTGATGAAAAGGCCTCCAGGTTTTTCACCTTTCCGATCATCACG
AATAGGGGAAATAAAAGAAGAAACAACTGTAAGTCCACCCCACACTTCCATGGCACCTGCACAAGATG
AAGAGCGGGATTCAGGAAAAGAACAAGGGCATACTCGTAGACATGACTGGGGCCATGAAAAACAAAGA
AAACATAATCTTGGCCATGGCCATAAACATGAACGTGACCAAGGGCATGGGCACCAAAGAGGACATGG
CCTTGGCCATCGACACGAACAACAGCATGGTCTTGGTCATGGACATAAGTTCAAACTTGATGATGATC
TTGAACACCAAGGGGGCCATGTCCTTGACCATGGACATAAGCATAAGCATGGTCATGGCCACGGAAAA
CATAAAAATAAAGGCAAAAAGAATGGAAAGCACAATGGTTGGAAAACAGAGCATTTGGCAAGCTCTTC
TGAAGACAGTACTACACCTTCTGCACAGACACAAGAGAAGACAGAAGGGCCAACACCCATCCCTTCCC
TAGCCAAGCCAGGTGTAACAGTTACCTTTTCTGACTTTCAGGACTGTGATCTCATTGCAACTATGATG
CCTCCTATATCACCAGCTCCCATACAGAGTGATGACGATTGGATCCCTGATATCCAGATAGACCCAAA
TGGCCTTTCATTTAACCCAATATCAGATTTTCCAGACACGACCTCCCCAAAATGTCCTGGACGCCCCT
GGAAGTCAGTTAGTGAAATTAATCCAACCACACAAATGAAAGAATCTTATTATTTCGATCTCACTGAT
GGCCTTTCT

| | | | |
|---|---|---|---|
| NOV1ac, SNP13379158 of | SEQ ID NO: 58 | | MW at 71956.8 kD |
| CG104903-03, Protein Sequence | SNP Pos: 82 | 644 aa | SNP Change: Asp to Asp |

MKLITILFLCSRLLLSLTQESQSEEIDCNDKDLFKAVDAALKKYNSQNQSNNQFVLYRITEATKTVGS
DTFYSFKYEIKEGDCPVQSGKTWQDCEYKDAAKAATGECTATVGKRSSTKFSVATQTCQITPAEGPVV
TAQYDCLGCVHPISTQSPDLEPILRHGIQYFNNNTQHSSLFMLNEVKRAQRQVVAGLNFRITYSIVQT
NCSKENFLFLTPDCKSLWNGDTGECTDNAYIDIQLRIASFSQNCDIYPGKDFVQPPTKICVGCPRDIP
TNSPELEETLTHTITKLNAENNATFYFKIDNVKKARVQVVAGKKYFIDFVARETTCSKESNEELTESC
ETKKLGQSLDCNAEVYVVPWEKKIYPTVNCQPLGMISLMKRPPGFSPFRSSRIGEIKEETTVSPPHTS
MAPAQDEERDSGKEQGHTRRHDWGHEKQRKHNLGHGHKHERDQGHGHQRGHGLGHGHEQQHGLGHGHK
FKLDDDLEHQGGHVLDHGHKHKHGHGHGKHKNKGKKNGKHNGWKTEHLASSSEDSTTPSAQTQEKTEG
PTPIPSLAKPGVTVTFSDFQDSDLIATMMPPISPAPIQSDDDWIPDIQIDPNGLSFNPISDFPDTTSP
KCPGRPWKSVSEINPTTQMKESYYFDLTDGLS

| | | |
|---|---|---|
| | SEQ ID NO: 59 | 1981 bp |
| NOV1ad, SNP13379159 of | ORF Start: ATG at 50 | ORF Stop: end of sequence |
| CG104903-03, DNA Sequence | SNP Pos: 356 | SNP Change: G to A |

AATTCCGGTTGAAACCATCCCTCAGCTCCTACAGGGAGATTGTTAGATCATGAAACTAATTACCATCC
TTTTCCTCTGCTCCAGGCTACTACTAAGTTTAACCCAGGAATCACAGTCCGAGGAAATTGACTGCAAT
GACAAGGATTTATTTAAAGCTGTGGATGCTGCTCTGAAGAAATATAACAGTCAAAACCAAAGTAACAA
CCAGTTTGTATTGTACCGCATAACTGAAGCCACTAAGACGGTTGGCTCTGACACGTTTTATTCCTTCA
AGTACGAAATCAAGGAGGGGGATTGTCCTGTTCAAAGTGGCAAAACCTGGCAGGACTGTGAGTACAAG
GATGCTGCAAAAGCAACCACTGGAGAATGCACGGCAACCGTGGGGAACAGGAGCAGTACGAAATTCTC
CGTGGCTACCCAGACCTGCCAGATTACTCCAGCCGAGGGCCCTGTGGTGACAGCCCAGTACGACTGCC
TCGGCTGTGTGCATCCTATATCAACGCAGAGCCCAGACCTGGAGCCCATTCTGAGACACGGCATTCAG
TACTTTAACAACAACACTCAACATTCCTCCCTCTTCATGCTTAATGAAGTAAAACGGGCCCAAAGACA
GGTGGTGGCTGGATTGAACTTTCGAATTACCTACTCAATTGTGCAAACGAATTGTTCCAAAGAGAATT
TTCTGTTCTTAACTCCAGACTGCAAGTCCCTTTGGAATGGTGATACCGGTGAATGTACAGATAATGCA
TACATCGATATTCAGCTACGAATTGCTTCCTTCTCACAGAACTGTGACATTTATCCAGGGAAGGATTT
TGTACAACCACCTACCAAGATTTGCGTGGGCTGCCCCAGAGATATACCCACCAACAGCCCAGACCTGG
AGGAGACACTGACTCACACCATCACAAAGCTTAATGCAGAGAATAACGCAACTTTCTATTTCAAGATT
GACAATGTGAAAAAAGCAAGAGTACAGGTGGTGGCTGGCAAGAAATATTTTATTGACTTCGTGGCCAG
GGAAACCACATGTTCCAAGGAAAGTAATGAAGAGTTGACCGAAAGCTGTGAGACCAAAAAACTTGGCC
AAAGCCTAGATTGCAACGCTGAAGTTTATGTGGTACCCTGGGAGAAAAAAATTTACCCTACTGTCAAC
TGTCAACCACTGGGAATGATCTCACTGATGAAAAGGCCTCCAGGTTTTTCACCTTTCCGATCATCACG
AATAGGGGAAATAAAAGAAGAAACAACTGTAAGTCCACCCCACACTTCCATGGCACCTGCACAAGATG
AAGAGCGGGATTCAGGAAAAGAACAAGGGCATACTCGTAGACATGACTGGGGCCATGAAAAACAAAGA
AAACATAATCTTGGCCATGGCCATAAACATGAACGTGACCAAGGGCATGGGCACCAAAGAGGACATGG
CCTTGGCCATGGACACGAACAACACCATGGTCTTGGTCATGGACATAAGTTCAAACTTGATGATGATC
TTGAACACCAAGGGGGCCATGTCCTTGACCATGGACATAAGCATAAGCATGGTCATGGCCACGGAAAA
CATAAAAATAAAGGCAAAAAGAATGGAAAGCACAATGGTTGGAAAACAGAGCATTTGGCAAGCTCTTC
TGAAGACAGTACTACACGTTCTGCACAGACACAAGAGAAGACAGAAGGGCCAACACCCATCCCTTCCC
TAGCCAAGCCAGGTGTAACAGTTACCTTTTCTGACTTTCAGGACTCTGATCTCATTGCAACTATGATG
CCTCCTATATCACCAGCTCCCATACAGAGTGATGACGATTGGATCCCTGATATCCAGATAGACCCAAA
TGGCCTTTCATTTAACCCAATATCAGATTTTCCAGACACGACCTCCCCAAAATGTCCTGGACGCCCCT
GGAAGTCAGTTAGTGAAATTAATCCAACCACACAAATGAAAGAATCTTATTATTTCGATCTCACTGAT
GGCCTTTCT

| | | | |
|---|---|---|---|
| NOV1ad, SNP13379159 of | SEQ ID NO: 60 | | MW at 71986.8 kD |
| CG104903-03, Protein Sequence | SNP Pos: 103 | 644 aa | SNP Change: Ala to Thr |

MKLITILFLCSRLLLSLTQESQSEEIDCNDKDLFKAVDAALKKYNSQNQSNNQFVLYRITEATKTVGS
DTFYSFKYEIKEGDCPVQSCKTWQDCEYKDAAKATTGECTATVGKRSSTKFSVATQTCQITPAEGPVV
TAQYDCLGCVHPISTQSPDLEPILRHGIQYFNNNTQHSSLFMLNEVKPAQRQVVAGLNFRITYSIVQT
NCSKENFLFLTPDCKSLWNGDTGECTDNAYIDIQLRIASFSQNCDIYPGKDFVQPPTKICVGCPRDIP
TNSPELEETLTHTITKLNAENNATFYFKIDNVKKARVQVVAGKKYFIDFVARETTCSKESNEELTESC
ETKKLGQSLDCNAEVYVVPWEKKIYPTVNCQPLGMISLMKRPPGFSPFRSSRIGEIKEETTVSPPHTS
MAPAQDEERDSGKEQGHTRRHDWGHEKQRKHNLGHGHKHERDQGHGHQRGHGLGHGHEQQHGLGHGHK
FKLDDDLEHQGGHVLDHGHKHKHGHGHGKHKNKGKKNGKHNGWKTEHLASSSEDSTTPSAQTQEKTEG
PTPIPSLAKPGVTVTFSDFQDSDLIATMMPPISPAPIQSDDDWIPDIQIDPNGLSFNPISDFPDTTSP
KCPGRPWKSVSEINPTTQMKESYYFDLTDGLS

| | | |
|---|---|---|
| | SEQ ID NO: 61 | 1981 bp |
| NOV1ae, SNP13375447 of | ORF Start: ATG at 50 | ORF Stop: end of sequence |
| CG104903-03, DNA Sequence | SNP Pos: 392 | SNP Change: A to U |

AATTCCGGTTGAAACCATCCCTCAGCTCCTAGAGGCAGATTGTTAGATCATGAAACTAATTACCATCC
TTTTCCTCTGCTCCAGGCTACTACTAAGTTTAACCCAGGAATCACAGTCCGAGGAAATTGACTGCAAT
GACAAGGATTTATTTAAAGCTGTGGATGCTGCTCTGAAGAAATATAACAGTCAAAACCAAAGTAACAA
CCAGTTTGTATTGTACCGCATAACTGAAGCCACTAAGACGGTTGCCTCTGACACGTTTTATTCCTTCA
AGTACGAAATCAAGGAGGGGGATTGTCCTGTTCAAAGTGGCAAAACCTCGCAGGACTGTGAGTACAAG
GATGCTGCAAAAGCAGCCACTGGAGAATGCACGGCAACCGTGGGGAAGAGGGGCAGTACGAAATTCTC
CGTGGCTACCCAGACCTGCCAGATTACTCCAGCCGAGGGCCCTCTGGTGACAGCCCAGTACGACTGCC
TCGCCTGTGTGCATCCTATATCAACGCAGAGCCCAGACCTGGAGCCCATTCTGAGACACGGCATTCAG
TACTTTAACAACAACACTCAACATTCCTCCCTCTTCATGCTTAATGAAGTAAAACGGGCCCAAAGACA
GGTGGTGGCTGGATTGAACTTTCGAATTACCTACTCAATTGTGCAAACGAATTGTTCCAAAGAGAATT
TTCTGTTCTTAACTCCAGACTGCAAGTCCCTTTGGAATGGTGATACCGGTGAATGTACAGATAATGCA
TACATCGATATTCAGCTACGAATTGCTTCCTTCTCACACAACTGTGACATTTATCCAGGGAAGGATTT
TGTACAACCACCTACCAAGATTTGCGTGGCCTGCCCCAGAGATATACCCACCAACAGCCCAGAGCTGG
AGGAGACACTGACTCACACCATCACAAAGCTTAATGCAGAGAATAACGCAACTTTCTATTTCAAGATT
GACAATGTGAAAAAAGCAAGAGTACAGGTGGTGGCTGGCAAGAAATATTTTATTGACTTCGTGGCCAC
GGAAACCACATGTTCCAAGGAAAGTAATGAAGAGTTGACCGAAAGCTGTGAGACCAAAAAACTTGGCC
AAAGCCTAGATTGCAACGCTCAAGTTTATGTGGTACCCTGGGAGAAAAAAATTTACCCTACTGTCAAC
TGTCAACCACTGGGAATGATCTCACTGATGAAAAGGCCTCCAGGTTTTTCACCTTTCCGATCATCACG
ATACGGGAAATAAAAGAAGAAACAACTGTAACTCCACCCCACACTTCCATGGCACCTGCACAAAGATG
AAGAGCCCGATTCAGGAAAAGAACAAGGGCATACTCGTAGACATGACTGGGGCCATGAAAAACAAAGA
AAACATAATCTTGGCCATGGCCATAAACATGAACGTGACCAAGGGCATGGGCACCAAAGAGGACATGG
CCTTGGCCATGGACACGAACAACAGCATGGTCTTGGTCATGGACATAAGTTCAAACTTGATGATGATC
TTGAACACCAAGGGGGCCATGTCCTTGACCATGGACATAAGCATAAGCATGGTCATGGCCACGGAAAA
CATAAAAATAAAGGCAAAAAGAATGGAAAGCACAATGGTTGGAAAACAGAGCATTTGGCAAGCTCTTC
TGAAGACAGTACTACACCTTCTGCACAGACACAAGAGAAGACAGAAGGGCCAACACCCATCCCTTCCC
TAGCCAAGCCAGGTGTAACAGTTACCTTTTCTGACTTTCAGGACTCTGATCTCATTGCAACTATGATG
CCTCCTATATCACCAGCTCCCATACAGAGTCATGACGATTGGATCCCTGATATCCAGATAGACCCAAA
TGGCCTTTCATTTAACCCAATATCAGATTTTCCAGACACGACCTCCCCAAAATGTCCTGGACGCCCCT
GGAAGTCAGTTAGTGAAATTAATCCAACCACACAAATGAAAGAATCTTATTATTTCGATCTCACTGAT
GGCCTTTCT

| | | | |
|---|---|---|---|
| NOV1ae, SNP13375447 of | SEQ ID NO: 62 | | MW at 71926.8 kD |
| CG104903-03, Protein Sequence | SNP Pos: 115 | 644 aa | SNP Change: Ser to Gly |

MKLITILFLCSRLLLSLTQESQSEEIDCNDKDLFKAVDAALKKYNSQNQSNNQFVLYRITEATKTVGS
DTFYSFKYEIKEGDCPVQSGKTWQDCEYKDAAKAATGECTATVGKRGSTKFSVATQTCQITPAEGPVV
TAQYDCLGCVHPISTQSPDLEPILRHGIQYFNNNTQHSSLFMLNEVKRAQRQVVAGLNFRITYSIVQT
NCSKENFLFLTPDCKSLWNGDTGECTDNAYIDIQLRIASFSQNCDIYPGKDFVQPPTKICVGCPRDIP
TNSPELEETLTHTITKLNAENNATFYFKIDNVKKARVQVVAGKKYFIDFVARETTCSKESNEELTESC
ETKKLGQSLDCNAEVYVVPWEKKIYPTVNCQPLGMISLMKRPPGFSPFRSSRIGEIKEETTVSPPHTS
MAPAQDEERDSGKEQGHTRRHDWGHEKQRKHNLGHGHKHERDQGHGHQRGHGLGHGHEQQHGLGHGHK
FKLDDDLEHQGGHVLDHGHKHKHGHGHGKHKNKGKKNGKHNGWKTEHLASSSEDSTTPSAQTQEKTEG
PTPIPSLAKPGVTVTFSDFQDSDLIATMMPPISPAPIQSDDDWIPDIQIDPNGLSFNPISDFPDTTSP
KCPGRPWKSVSEINPTTQMKESYYFDLTDGLS

| | | |
|---|---|---|
| | SEQ ID NO: 63 | 1981 bp |
| NOV1af, SNP13380032 of | Start: ATG at 50 | ORF Stop: end of sequence |
| CG104903-03, DNA Sequence | SNP Pos: 456 | SNP Change: T to C |

AATTCCGGTTGAAACCATCCCTCAGCTCCTAGAGGGACATTGTTAGATCATGAAACTAATTACCATCC
TTTTCCTCTGCTCCAGGCTACTACTAAGTTTAACCCAGGAATCACAGTCCGAGGAAATTGACTGCAAT
GACAAGGATTTATTTAAAGCTGTGGATGCTGCTCTGAAGAAATATAACAGTCAAAACCAAAGTAACAA
CCAGTTTGTATTGTACCGCATAACTGAAGCCACTAAGACGGTTGGCTCTGACACGTTTTATTCCTTCA
AGTACGAAATCAAGGAGGGGGATTGTCCTGTTCAAAGTGGCAAAACCTGGCAGGACTGTGAGTACAAG
GATGCTGCAAAAGCAGCCACTGGAGAATGCACGGCAACCGTGGGGAAGAGGAGCAGTACGAAATTCTC
CGTGGCTACCCAGACCTGCCACATTACTCCAGCCCAGGGCCCTGTGGCGACAGCCCAGTACGACTGCC
TCGGCTGTGTGCATCCTATATCAACGCAGAGCCCAGACCTGGAGCCCATTCTGAGACACGGCATTCAG
TACTTTAACAACAACACTCAACATTCCTCCCTCTTCATGCTTAATGAAGTAAAACGGGCCCAAAGACA
GGTGGTGGCTGGATTGAACTTTCGAATTACCTACTCAATTGTGCAAACGAATTGTTCCAAAGACAATT
TTCTGTTCTTAACTCCAGACTGCAAGTCCCTTTGGAATGGTGATACCGGTGAATGTACAGATAATGCA
TACATCGATATTCAGCTACGAATTGCTTCCTTCTCACAGAACTGTGACATTTATCCAGGGAAGGATTT
TGTACAACCACCTACCAAGATTTGCGTGGGCTGCCCCAGAGATATACCCACCAACAGCCCAGAGCTGG
AGGAGACACTGACTCACACCATCACAAAGCTTAATGCAGAGAATAACGCAACTTTCTATTTCAAGATT
GACAATGTGAAAAAAGCAAGAGTACAGGTGGTGGCTGGCAAGAAATATTTTATTGACTTCGTGGCCAG
GGAAACCACATGTTCCAAGGAAAGTAATGAAGAGTTGACCGAAAGCTGTGAGACCAAAAAACTTGGCC
AAAGCCTAGATTGCAACGCTGAAGTTTATGTGGTACCCTGGGAGAAAAAAATTTACCCTACTGTCAAC
TCTCAACCACTGGGAATGATCTCACTGATGAAAAGGCCTCCAGGTTTTTCACCTTTCCGATCATCACG
AATAGGGGAAATAAAAGAAGAAACAACTGTAAGTCCACCCCACACTTCCATGGCACCTGCACAAGATG
AAGAGCGGGATTCAGGAAAAGAACAAGGGCATACTCGTAGACATGACTGGGGCCATGAAAAACAAAGA
AAACATAATCTTGGCCATGGCCATAAACATGAACGTGACCAAGGGCATGGGCACCAAAGAGGACATGG
CCTTGGCCATGGACACGAACAACAGCATGGTCTTGGTCATGGACATAAGTTCAAACTTGATGATGATC
TTGAACACCAAGGGGGCCATGTCCTTGACCATGGACATAAGCATAAGCATGGTCATGGCCACGGAAAA
CATAAAAATAAAGGCAAAAAGAATGGAAAGCACAATGGTTGGAAAACAGAGCATTTGGCAAGCTCTTC
TGAAGACAGTACTACACCTTCTGCACAGACACAAGAGAAGACAGAAGGGCCAACACCCATCCCTTCCC
TAGCCAAGCCAGGTGTAACAGTTACCTTTTCTGACTTTCAGGACTCTGATCTCATTGCAACTATGATG
CCTCCTATATCACCAGCTCCCATACAGAGTGATGACGATTGGATCCCTGATATCCAGATAGACCCAAA
TGGCCTTTCATTTAACCCAATATCAGATTTTCCAGACACGACCTCCCCAAAATGTCCTGGACGCCCCT
GGAAGTCAGTTAGTGAAATTAATCCAACCACACAAATGAAAGAATCTTATTATTTCGATCTCACTGAT
GGCCTTTCT

| | | | |
|---|---|---|---|
| NOV1af, SNP13380032 of | SEQ ID NO: 64 | | MW at 71928.7 kD |
| CG104903-03, Protein Sequence | SNP Pos: 136 | 644 aa | SNP Change: Val to Ala |

MKLITILFLCSRLLLSLTQESQSEEIDCNDKDLFKAVDAALKKYNSQNQSNNQFVLYRITEATKTVGS
DTFYSFKYEIKEGDCPVQSGKTWQDCEYKDAAKAATGECTATVGKRSSTKFSVATQTCQITPAEGPVA
TAQYDCLGCVHPISTQSPDLEPILRHGIQYFNNNTQHSSLFMLNEVKRAQRQVVAGLNFRITYSIVQT
NCSKENFLFLTPDCKSLWNGDTGECTDNAYIDIQLRIASFSQNCDTYPGKDFVQPPTKICVGCPRDIP
TNSPELEETLTHTITKLNAENNATFYFKIDNVKKARVQVVAGKKYFIDFVARETTCSKESNEELTESC
ETKKLGQSLDCNAEVYVVPWEKKIYPTVNCQPLGMISLMKRPPGFSPFRSSRTGEIKEETTVSPPHTS
MAPAQDEERDSGKEQGHTRRHDWGHEKQRKHNLGHGHKHERDQGHGHQRGHGLGHGHEQQHGLGHGHK
FKLDDDLEHQGGHVLDHGHKHKHGHQHGKHKNKGKKNGKHNGWKTEHLASSSEDSTTPSAQTQEKTEG
PTPIPSLAKPGVTVTFSDFQDSDLIATMMPPISPAPIQSDDDWTPDIQIDPNGLSFNPISDFPDTTSP
KCPGRPWKSVSEINPTTQMKESYYFDLTDGLS

| | | |
|---|---|---|
| | SEQ ID NO: 65 | 1981 bp |
| NOV1ag, SNP13380035 of | ORF Start: ATG at 50 | ORF Stop: end of sequence |
| CG104903-03, DNA Sequence | SNP Pos: 978 | SNP Change: A to G |

AATTCCGGTTGAAACCATCCCTCAGCTCCTAGAGGGAGATTGTTACATCATGAAACTAATTACCATCC
TTTTCCTCTGCTCCAGGCTACTACTAAGTTTAACCCAGGAATCACAGTCCGAGGAAATTGACTGCAAT
GACAAGGATTTATTTAAAGCTGTGGATCCTGCTCTGAAGAAATATAACAGTCAAAACCAAAGTAACAA
CCAGTTTGTATTGTACCGCATAACTGAAGCCACTAAGACGGTTGGCTCTGACACGTTTTATTCCTTCA
AGTACGAAATCAAGGAGGGGGATTGTCCTGTTCAAAGTGGCAAAACCTGGCAGGACTGTGAGTACAAG
GATGCTGCAAAAGCAGCCACTGGAGAATGCACGGCAACCGTGGGGAAGAGGAGCAGTACGAAATTCTC
CGTGGCTACCCAGACCTGCCAGATTACTCCAGCCGAGGGCCCTGTGGTGACAGCCCAGTACGACTGCC
TCGGCTGTGTGCATCCTATATCAACGCAGAGCCCAGACCTGGAGCCCATTCTGAGACACGGCATTCAG
TACTTTAACAACAACACTCAACATTCCTCCCTCTTCATGCTTAATGAAGTAAAACGGGCCCAAAGACA
GGTGGTGGCTGGATTGAACTTTCGAATTACCTACTCAATTGTGCAAACGAATTGTTCCAAAGAGAATT
TTCTGTTCTTAACTCCAGACTGCAAGTCCCTTTGGAATGGTGATACCGGTGAATGTACAGATAATGCA
TACATCGATATTCAGCTACGAATTGCTTCCTTCTCACAGAACTGTGACATTTATCCAGGGAAGGATTT
TGTACAACCACCTACCAAGATTTGCGTGGGCTGCCCCAGAGATATACCCACCAACAGCCCAGAGCTGG
AGGAGACACTGACTCACACCATCACAAAGCTTAATGCAGAGAATAACGCAACTTTCTATTTCAAGATT
GACAATGTGAAAAAAGCAAGAGTACGGGTGGTGGCTGGCAAGAAATATTTTATTGACTTCGTGGCCAG
GGAAACCACATGTTCCAAGGAAAGTAATGAAGAGTTGACCGAAAGCTGTGAGACCAAAAAACTTGGCC
AAAGCCTAGATTGCAACGCTGAAGTTTATGTGGTACCCTGGGAGAAAAAAATTTACCCTACTGTCAAC
TGTCAACCACTGGGAATGATCTCACTGATGAAAAGGCCTCCAGGTTTTTCACCTTTCCGATCATCACG
AATAGGGGAAATAAAAGAAGAAACAACTGTAAGTCCACCCCACACTTCCATGGCACCTGCACAAGATG
AAGAGCGGGATTCAGGAAAAGAACAAGGGCATACTCGTAGACATGACTGGGGCCATGAAAAACAAAGA
AAACATAATCTTGGCCATGGCCATAAACATGAACGTGACCAAGGGCATGGGCACCAAAGAGGACATGG
CCTTGGCCATGGACACGAACAACAGCATGGTCTTGGTCATGGACATAAGTTCAAACTTGATGATGATC
TTGAACACCAAGGGGGCCATGTCCTTGACCATGGACATAAGCATAAGCATGGTCATGGCCACGGAAAA
CATAAAAATAAAGGCAAAAAGAATGGAAAGCACAATGGTTGGAAAACAGAGCATTTGGCAAGCTCTTC
TGAAGACAGTACTACACCTTCTGCACAGACACAAGAGAAGACAGAAGGGCCAACACCCATCCCTTCCC
TAGCCAAGCCAGGTGTAACAGTTACCTTTTCTGACTTTCAGGACTCTGATCTCATTGCAACTATGATG
CCTCCTATATCACCAGCTCCCATACAGAGTGATGACGATTGGATCCCTGATATCCAGATAGACCCAAA
TGGCCTTTCATTTAACCCAATATCAGATTTTCCAGACACGACCTCCCCAAAATGTCCTGGACGCCCCT
GGAAGTCAGTTAGTGAAATTAATCCAACCACACAAATGAAAGAATCTTATTATTTCGATCTCACTGAT
GGCCTTTCT

| | | | |
|---|---|---|---|
| NOV1ag, SNP13380035 of | SEQ ID NO: 66 | | MW at 71984.8 kD |
| CG104903-03, Protein Sequence | SNP Pos: 310 | 644 aa | SNP Change: Gln to Arg |

MKLITILFLCSRLLLSLTQESQSEEIDCNDKDLFKAVDAALKKYNSQNQSNNQFVLYRITEATKTVGS
DTFYSFKYEIKEGDCPVQSGKTWQDCEYKDAAKAATGECTATVGKRSSTKFSVATQTCQITPAEGPVV
TAQYDCLGCVHPISTQSPDLEPILRHCIQYFNNNTQHSSLFMLNEVKRAQRQVVAGLNFRITYSIVQT
NCSKENFLFLTPDCKSLWNGDTGECTDNAYIDIQLRIASFSQNCDIYPGKDFVQPPTKICVCCPRDIP
TNSPELEETLTHTITKLNAENNATFYFKIDNVKKARVRVVAGKKYFIDFVARETTCSKESNEELTESC
ETKKLGQSLDCNAEVYVVPWEKKIYPTVNCQPLGMISLMKRPPGFSPFRSSRIGEIKEETTVSPPHTS
MAPAQDEERDSGKEQGHTRRHDWGHEKQRKHNLGHGHKHERDQGHGHQRGHGLGHGHEQQHGLGHGHK
FKLDDDLEHQGGHVLDHGHKHKHGHGHGKHKNKGKKNGKHNGWKTEHLASSSEDSTTPSAQTQEKTEG
PTPIPSLAKPGVTVTFSDFQDSDLIATMMPPISPAPIQSDDDWIPDIQIDPNGLSFNPISDFPDTTSP
KGPGRPWKSVSEINPTTQMKESYYFDLTDGLS

| | | |
|---|---|---|
| | SEQ ID NO: 67 | 1981 bp |
| NOV1ah, SNP13375317 of | ORF Start: ATG at 50 | ORF Stop: end of sequence |
| CG104903-03, DNA Sequence | SNP Pos: 1008 | SNP Change: A to G |

AATTCCGGTTCAAACCATCCCTCAGCTCCTAGAGGGAGATTGTTAGATCATGAAACTAATTACCATCC
TTTTCCTCTGCTCCAGGCTACTACTAAGTTTAACCCAGGAATCACAGTCCGAGGAAATTGACTGCAAT
GACAAGGATTTATTTAAAGCTGTGGATGCTGCTCTGAAGAAATATAACAGTCAAAACCAAAGTAACAA
CCAGTTTGTATTGTACCGCATAACTGAAGCCACTAAGAGGGTTGGCTCTGACACGTTTTATTCCTTCA
AGTACGAAATCAAGGAGGGGGATTGTCCTGTTCAAAGTGGCAAAACCTGGCAGGACTGTGAGTACAAG
GATGCTGCAAAACCAGCCACTGGAGAATGCACGGCAACCGTGGGGAAGAGGACCAGTACGAAATTCTC
CGTGGCTACCGAGACCTGCCAGATTACTCGAGCCGAGGGCCCTGTGGTGAGAGCCCAGTACGACTGCC
TCGGCTGTGTGCATCCTATATCAACGCAGAGCCCAGACCTGGAGCCCATTCTGAGACACGGCATTCAG
TACTTTAACAACAACACTCAACATTCCTCCCTCTTCATGCTTAATGAAGTAAAACGGGCCCAAAGACA
GGTGGTGGCTGGATTGAACTTTGGAATTACCTACTCAATTGTGCAAACGAATTGTTCCAAAGAGAATT
TTCTGTTCTTAACTCCAGACTGCAAGTCCCTTTGGAATGGTGATACCGGTGAATGTACAGATAATGCA
TACATCGATATTCAGCTACGAATTGCTTCCTTCTCACAGAACTGTGACATTTATCGAGGGAAGGATTT
TGTACAACCACCTACCAAGATTTGCGTGGGCTGCCCCAGAGATATACCCACCAACACCCCAGAGCTGG
AGGAGACACTGACTCACACCATGACAAAGCTTAATGCAGAGAATAACGCAACTTTCTATTTCAAGATT
GACAATGTGAAAAAAGCAAGAGTACAGGTGGTGGCTGGCAAGAAATATTTTATTGGCTTCGTGGCCAG
GGAAACCACATGTTCCAAGGAAAGTAATGAAGAGTTGACCGAAAGCTGTGAGACCAAAAAACTTGGCC
AAAGCCTAGATTGCAACGCTGAAGTTTATGTGGTACCCTGGGACAAAAAAATTTACCCTACTGTCAAC
TGTCAACCACTGGGAATGATCTCACTGATGAAAAGGCCTCCAGGTTTTTCACCTTTCCGATCATCACG
AATAGGGGAAATAAAAGAAGAAACAACTGTAAGTCCACCCCACACTTCCATGGCACCTGCACAAGATG
AAGAGCGGGATTCAGGAAAAGAACAAGGGCATACTCGTAGACATGACTGGGGCCATGAAAAACAAAGA
AAACATAATCTTGGCCATGGCCATAAACATGAACGTGACCAAGGGCATGGGCACCAAAGAGGACATGG
CCTTGGCCATGCACACGAACAACAGCATGGTCTTGGTCATGGACATAAGTTCAAACTTGATGATGATC
TTGAACACCAAGGGGGCCATGTCCTTGACCATGGACATAAGCATAAGCATGGTCATGGCCACGGAAAA
CATAAAAATAAACGCAAAAAGAATGGAAAGCACAATGGTTGGAAAACAGAGCATTTGGCAAGCTCTTC
TGAAGACAGTACTACACCTTCTGCACACACACAAGAGAAGACAGAAGGGCCAACACCCATCCCTTCCC
TAGCCAAGCCAGGTGTAACAGTTACCTTTTCTGACTTTCAGGACTCTGATCTCATTGCAACTATGATG
CCTCCTATATCACCAGCTCCCATACAGAGTGATGACGATTGGATCCCTGATATCCAGATAGACCCAAA
TGGCCTTTCATTTAACCCAATATCAGATTTTCCAGACACGACCTCCCCAAAATGTCCTGGACGCCCCT
GGAAGTCAGTTAGTGAAATTAATCCAACCACACAAATGAAAGAATCTTATTATTTCGATCTCACTGAT
GGCCTTTCT

| | | | |
|---|---|---|---|
| NOV1ah, SNP13375317 of | SEQ ID NO: 68 | | MW at 71898.8 kD |
| CG104903-03, Protein Sequence | SNP Pos: 320 | 644 aa | SNP Change: Asp to Gly |

MKLITILFLCSRLLLSLTQESQSEEIDCNDKDLFKAVDAALKKYNSQNQSNNQFVLYRITEATKTVGS
DTFYSFKYEIKEGDCPVOSGKTWODCEYKDAAKAATGECTATVGKRSSTKFSVATOTCOITPAEGPVV
TAQYDCLGCVHPISTQSPDLEPILRHGIQYFNNNTQHSSLFMLNEVKRAQRQVVAGLNFRITYSIVQT
NCSKENFLFLTPDCKSLWNGDTCECTDNAYIDIQLRIASFSQNCDIYPGKDFVQPPTKICVGCPRDIP
TNSPELEETLTHTITKLNAENNATFYFKIDNVKKARVQVVAGKKYFIGFVARETTCSKESNEELTESC
ETKKLGQSLDCNAEVYVVPWEKKIYPTVNCQPLGMISLMKRPPGFSPFRSSRIGEIKEETTVSPPHTS
MAPAQDEERDSGKEQGHTRRHDWGHEKQRKHNLGHGHKHERDQGHGHQRGHGLGHGHEQQHGLGHGHK
FKLDDDLEHQGGHVLDHGHKHKHGHGHGKHKNKGKKNGKHNGWKTEHLASSSEDSTTPSAQTQEKTEG
PTPIPSLAKPGVTVTFSDFQDSDLIATMMPPISPAPIQSDDDWIPDIQIDPNGLSFNPISDFPDTTSP
KCPGRPWKSVSEINPTTQMKESYYFDLTDGLS

| | | |
|---|---|---|
| | SEQ ID NO: 69 | 1981 bp |
| NOV1ai, SNP13375316 of | ORF Start: ATG at 50 | ORF Stop: end of sequence |
| CG104903-03, DNA Sequence | SNP Pos: 1023 | SNP Change: A to G |

AATTCCGGTTGAAACCATCCCTCAGCTCCTAGAGGGAGATTGTTAGATCATGAAACTAATTACCATCC
TTTTCCTCTGCTCCAGGCTACTACTAAGTTTAACCCAGGAATCACAGTCCGAGGAAATTGACTGCAAT
GACAAGGATTTATTTAAAGCTGTGGATGCTGCTCTGAAGAAATATAACAGTCAAAACCAAAGTAACAA
CCAGTTTGTATTGTACCGCATAACTGAAGCCACTAAGACGGTTGGCTCTGACACGTTTTATTCCTTCA
AGTACGAAATCAAGGAGGGGGATTGTCCTGTTCAAAGTGGCAAAACCTGGCAGGACTGTGAGTACAAG
GATGCTGCAAAAGCAGCCACTGGAGAATGCACGGCAACCGTGGGGAAGAGGAGCAGTACGAAATTCTC
CGTGGCTACCCAGACCTGCCAGATTACTCCAGCCGAGGGCCCTGTGGTGACAGCCCAGTACGACTGCC
TCGGCTGTGTGCATCCTATATCAACGCAGAGCCCAGACCTGGAGCCCATTCTGAGACACGGCATTCAG
TACTTTAACAACAACACTCAACATTCCTCCCTCTTCATGCTTAATGAAGTAAAACGGGCCCAAAGACA
GGTGGTGGCTGGATTGAACTTTCGAATTACCTACTCAATTGTGCAAACGAATTGTTCCAAAGAGAATT
TTCTGTTCTTAACTCCAGACTGCAAGTCCCTTTGGAATGGTGATACCGGTGAATGTACAGATAATGCA
TACATCGATATTCAGCTACGAATTGCTTCCTTCTCACAGAACTGTGACATTTATCCAGGGAAGGATTT
TGTACAACCACCTACCAAGATTTGCGTGGGCTGCCCCAGAGATATACCCACCAACAGCCCAGAGCTGG
AGGAGACACTGACTCACACCATCACAAAGCTTAATGCAGAGAATAACGCAACTTTCTATTTCAAGATT
GACAATGTGAAAAAAGCAAGAGTACAGGTGGTGGCTGGCAAGAAATATTTTATTGACTTCGTGGCCAG
GGGAACCACATGTTCCAAGGAAAGTAATGAAGAGTTGACCGAAAGCTGTGAGACCAAAAAACTTGGCC
AAAGCCTAGATTGGAACGCTGAAGTTTATGTGGTACCCTGGGAGAAAAAAATTTACCCTACTGTCAAC
TGTCAACCACTGGGAATGATCTCACTGATGAAAAGGCCTCCAGGTTTTTCACCTTTCCGATCATCACG
AATAGGGGAAATAAAAGAAGAAACAACTGTAAGTCCACCCCACACTTCCATGGCACCTGCACAAGATG
AAGAGCGGGATTCAGGAAAAGAACAAGGGCATACTCGTAGACATGACTGGGGCCATGAAAAACAAAGA
AAACATAATCTTGGCCATGGCCATAAACATGAACGTGACCAAGGGCATGGGCACCAAAGAGGACATGG
CCTTGGCCATGGACACGAACAACAGCATGGTCTTGGTCATGGACATAAGTTCAAACTTGATGATGATC
TTGAACACCAAGGGGGCCATGTCCTTGACCATGGACATAAGCATAAGCATGGTCATGGCCACGGAAAA
CATAAAAATAAAGGCAAAAAGAATGGAAAGCACAATGGTTGGAAAACAGAGCATTTGGCAAGCTCTTC
TGAAGACAGTACTACACCTTCTGCACAGACACAAGAGAAGACAGAAGGGCCAACACCCATCCCTTCCC
TAGCCAAGCCAGGTGTAACAGTTACCTTTTCTCACTTTCAGGACTCTGATCTCATTGCAACTATGATG
CCTCCTATATCACCAGCTCCCATACAGAGTGATGACGATTGGATCCCTGATATCCAGATAGACCCAAA
TGGCCTTTCATTTAACCCAATATCAGATTTTCCAGACACGACCTCCCCAAAATGTCCTGGACGCCCCT
GGAAGTCAGTTAGTGAAATTAATCCAACCACACAAATGAAAGAATCTTATTATTTCGATCTCACTGAT
GGCCTTTCT

| | | | |
|---|---|---|---|
| NOV1ai, SNP13375316 of | SEQ ID NO: 70 | | MW at 71884.7 kD |
| CG104903-03, Protein Sequence | SNP Pos: 325 | 644 aa | SNP Change: Glu to Gly |

MKLITILFLCSRLLLSLTQESQSEEIDCNDKDLFKAVDAALKKYNSQNQSNNQFVLYRITEATKTVGS
DTFYSFKYEIKEGDCPVQSGKTWQDCEYKDAAKAATGECTATVGKRSSTKFSVATQTCQITPAEGPVV
TAQYDCLGCVHPISTQSPDLEPILRHGIQYFNNNTQHSSLFMLNEVKRAQRQVVAGLNFRITYSIVQT
NCSKENFLFLTPDCKSLWNGDTGECTDNAYIDIQLRIASFSQNCDIYPGKDFVQPPTKICVGCPRDIP
TNSPELEETLTHTITKLNAENNATFYFKIDNVKKARVQVVAGKKYFIDFVARGTTCSKESNEELTESC
ETKKLGQSLDCNAEVYVVPWEKKIYPTVNCQPLGMISLMKRPPGFSPFRSSRIGEIKEETTVSPPHTS
MAPAQDEERDSCKEQGHTRRHDWGHEKQRKHNLGHGHKHERDQGHGHQRGHGLGHGHEQQHGLGHGHK
FKLDDDLEHQGGHVLDHCHKHKHGHGHGKHKNKGKKNGKHNGWKTEHLASSSEDSTTPSAQTQEKTEG
PTPIPSLAKPGVTVTFSDFQDSDLIATMMPPISPAPIQSDDDWIPDIQIDPNGLSFNPISDFPDTTSP
KCPGRPWKSVSEINPTTQMKESYYFDLTDGLS

| | | |
|---|---|---|
| | SEQ ID NO: 71 | 1981 bp |
| NOV1aj, SNP13379639 of | ORF Start: ATG at 50 | ORF Stop: end of sequence |
| CG104903-03, DNA Sequence | SNP Pos: 1041 | SNP Change: A to G |

AATTCCGGTTGAAACCATCCCTCAGCTCCTAGAGGGAGATTGTTAGATCATGAAACTAATTACCATCC
TTTTCCTCTGCTCCAGGCTACTACTAAGTTTAACCCAGGAATCACAGTCCGAGGAAATTGACTGCAAT
GACAAGGATTTATTTAAAGCTGTGGATGCTGCTCTGAAGAAATATAACAGTCAAAACCAAAGTAACAA
CCAGTTTGTATTGTACCGCATAACTGAAGCCACTAAGACGGTTGGCTCTGACACGTTTTATTCCTTCA
AGTACGAAATCAAGGAGGGGGATTGTCCTGTTCAAAGTGGCAAAACCTGGCAGGACTGTGAGTACAAG
GATGCTGCAAAAGCAGCCACTGGAGAATGCACGGCAACCGTGGGGAACAGGAGCAGTACGAAATTCTC
CGTGGCTACCCAGACCTGCCACATTACTCCAGCCGAGGGCCCTGTGGTGACAGCCCAGTACGACTGCC
TCGGCTGTGTGCATCCTATATCAACGCAGAGCCCAGACCTGGAGCCCATTCTGAGACACGGCATTCAG
TACTTTAACAACAACACTCAACATTCCTCCCTGTTCATGCTTAATGAAGTAAAACGGGCCCAAAGACA
GGTGGTGGCTGGATTGAACTTTCGAATTACCTACTCAATTGTGCAAACGAATTGTTCCAAAGACAATT
TTCTGTTCTTAACTCCAGACTGCAAGTCCCTTTGGAATGGTGATACCGGTGAATGTACAGATAATGCA
TACATCGATATTCAGCTACGAATTGCTTCCTTCTCACAGAACTGTGACATTTATCCAGGGAAGGATTT
TGTACAACCACCTACCAAGATTTGCGTGGGCTGCCCCAGACATATACCCACCAACAGCCCAGAGCTGG
AGGAGACACTGACTCACACCATCACAAAGCTTAATGCAGAGAATAACGCAACTTTCTATTTCAAGATT
GACAATGTGAAAAAAGCAAGAGTACAGGTGGTGGCTGGCAAGAAATATTTTATTGACTTCGTGGCCAG
GGAAACCACATGTTCCAAGGGAAGTAATGAAGAGTTGACCGAAAGCTGTGAGACCAAAAAACTTGGCC
AAAGCCTAGATTGCAACGCTGAAGTTTATGTGGTACCCTGGGAGAAAAAAATTTACCCTACTGTCAAC
TGTCAACCACTGGGAATGATCTCACTGATGAAAAGGCCTCCAGGTTTTTCACCTTTCCGATCATCACG
AATAGGGGAAATAAAAGAAGAAACAACTGTAAGTCCACCCCACACTTCCATGGCACCTGCACAAGATG
AAGAGCGGGATTCAGGAAAAGAACAAGGGCATACTCGTAGACATGACTGGGGCCATGAAAAACAAAGA
AAACATAATCTTGGCCATGGCCATAAACATGAACGTGACCAAGGGCATGGGCACCAAAGAGGACATGC
CCTTGGCCATGGACACGAACAACAGCATCGTCTTGGTCATGGACATAAGTTCAAACTTGATGATGATC
TTGAACACCAAGGGGGCCATGTCCTTGACCATGGACATAAGCATAAGCATGGTCATGGCCACGGAAAA
CATAAAAATAAAGGCAAAAAGAATGGAAAGCACAATGGTTGGAAAACAGAGCATTTGGCAAGCTCTTC
TGAAGACAGTACTACACCTTCTGCACAGACACAAGAGAAGACAGAAGGGCCAACACCCATCCCTTCCC
TAGCCAAGCCAGGTGTAACAGTTACCTTTTCTGACTTTCAGGACTCTGATCTCATTGCAACTATGATG
CCTCCTATATCACCAGCTCCCATACAGAGTGATGACGATTGGATCCCTGATATCCAGATAGACCCAAA
TGGCCTTTCATTTAACCCAATATCAGATTTTCCAGACACGACCTCCCCAAAATGTCCTGGACGCCCCT
GGAAGTCAGTTAGTGAAATTAATCCAACCACACAAATGAAAGAATCTTATTATTTCGATCTCACTGAT
GGCCTTTCT

| | | | |
|---|---|---|---|
| NOV1aj, SNP13379639 of | SEQ ID NO: 72 | | MW at 71884.7 kD |
| CG104903-03, Protein Sequence | SNP Pos: 331 | 644 aa | SNP Change: Glu to Gly |

MKLITILFLCSRLLLSLTQESQSEEIDCNDKDLFKAVDAALKKYNSQNQSNNQFVLYRITEATKTVGS
DTFYSFKYEIKECDCPVQSGKTWQDCEYKDAAKAATGECTATVGKRSSTKFSVATQTCQITPAEGPVV
TAQYDCLGCVHPISTQSPDLEPILRHGIQYFNNNTQHSSLFMLNEVKRAQRQVVAGLNFRITYSIVQT
NCSKENFLFLTPDCKSLWNGDTGECTDNAYIDIQLRIASFSQNCDIYPGKDFVQPPTKICVGCPRDIP
TNSPELEETLTHTITKLNAENNATFYFKIDNVKKARVQVVAGKKYFIDFVARETTCSKGSNEELTESC
ETKKLCQSLDCNAEVYVVPWEKKIYPTVNCQPLGMISLMKRPPCFSPFRSSRIGEIKEETTVSPPHTS
MAPAQDEERDSGKEQGHTRRHDWGHEKQRKHNLGHGHKHERDQGHGHQRGHGLGHGHEQQHGLGHGHK
FKLDDDLEHQGGHVLDHGHKHKHGHGHGKHKNKGKKNGKHNCWKTEHLASSSEDSTTPSAQTQEKTEG
PTPIPSLAKPGVTVTFSDFQDSDLIATMMPPISPAPIQSDDDWIPDIQIDPNGLSFNPISDFPDTTSP
KCPGRPWKSVSETNPTTQMKESYYFDLTDGLS

| | | |
|---|---|---|
| | SEQ ID NO: 73 | 1981 bp |
| NOV1ak, SNP13376277 of | ORF Start: ATG at 50 | ORF Stop: end of sequence |
| CG104903-03, DNA Sequence | SNP Pos: 1157 | SNP Change: T to C |

AATTCCGGTTGAAACCATCCCTCAGGTCCTAGAGGGAGATTGTTAGATCATGAAACTAATTACCATCC
TTTTCCTCTGCTCCAGGCTACTACTAAGTTTAACCCAGGAATCACAGTCCGAGGAAATTGACTGCAAT
GACAAGGATTTATTTAAAGCTGTGGATGCTGCTCTGAAGAAATATAACAGTCAAAACCAAAGTAACAA
CCAGTTTGTATTGTACCGCATAACTGAAGCCACTAAGACGGTTGGCTCTGACACGTTTTATTCCTTCA
AGTACGAAATCAAGGAGGGGGATTGTCCTGTTCAAAGTGGCAAAACCTGGCAGGACTGTGAGTACAAG
GATGCTGCAAAAGCAGCCACTGGAGAATGCACGGCAACCGTGGGGAAGAGGAGCAGTACGAAATTCTC
CGTGGCTACCCAGACCTGCCAGATTACTCCAGCCGAGGGCCCTGTGGTGACACCCCAGTACGACTGCC
TCGGCTGTGTGCATCCTATATCAACGCACAGCCCAGACCTGGAGCCCATTCTGAGACACGGCATTCAG
TACTTTAACAACAACACTCAACATTCCTCCCTCTTCATGCTTAATGAAGTAAAACGGCCCCAAAGACA
GGTGGTGGCTGGATTCAACTTTCGAATTACCTACTCAATTGTGCAAACGAATTGTTCCAAAGAGAATT
TTCTGTTCTTAACTCCAGACTGCAAGTCCCTTTGGAATGGTGATACCGGTGAATGTACACATAATGCA
TACATCGATATTCAGCTACGAATTGCTTCCTTCTCACAGAACTGTGACATTTATCCAGGGAAGGATTT
TGTACAACCACCTACCAAGATTTGCGTGGGCTGCCCCAGACATATACCCACCAACAGCCCAGAGCTGG
AGGAGACACTGACTCACACCATCACAAAGCTTAATGCAGAGAATAACGCAACTTTCTATTTCAAGATT
GACAATGTGAAAAAAGCAAGAGTACAGGTGGTGGCTGGCAAGAAATATTTTATTGACTTCGTGGCCAG
GGAAACCACATGTTCCAAGGAAAGTAATGAAGAGTTGACCGAAAGCTGTGAGACCAAAAAACTTGGCC
AAAGCCTAGATTGCAACGCTGAAGTTTATGTGGTACCCTGGGAGAAAAAAATTTACCCTACTGTCAAC
CGTCAACCACTGGGAATGATCTCACTGATGAAAAGGCCTCCAGGTTTTTCACCTTTCCGATCATCACG
AATAGGGGAAATAAAAGAAGAAACAACTGTAAGTCCACCCCACACTTCCATGGCACCTGCACAAGATG
AAGAGCGGGATTCAGGAAAAGAACAAGGGCATACTCGTAGACATGACTGGGGCCATGAAAAACAAAGA
AAACATAATCTTGGCCATGGCCATAAACATGAACGTGACCAAGGGCATGGGCACCAAAGAGGACATGG
CCTTGGCCATGGACACGAACAACAGCATGGTCTTGGTCATGGACATAAGTTCAAACTTGATGATGATC
TTGAACACCAAGGGGGCCATGTCCTTGACCATGGACATAAGCATAAGCATGGTCATGGCCACGGAAAA
CATAAAAATAAAGGCAAAAAGAATGGAAAGCACAATGGTTGGAAAACAGAGCATTTGGCAACCTCTTC
TGAAGACAGTACTACACCTTCTGCACAGACACAAGAGAAGACAGAAGGGCCAACACCCATCCCTTCCC
TAGCCAAGCCAGGTGTAACAGTTACCTTTTCTGACTTTCAGGACTCTGATCTCATTGCAACTATGATG
CCTCCTATATCACCAGCTCCCATACAGAGTGATGACGATTGGATCCCTGATATCCAGATAGACCCAAA
TGGCCTTTCATTTAACCCAATATCAGATTTTCCAGACACGACCTCCCCAAAATGTCCTGGACGCCCCT
GGAAGTCAGTTAGTGAAATTAATCCAACCACACAAATGAAAGAATCTTATTATTTCGATCTCACTGAT
GGCCTTTCT

| | | | |
|---|---|---|---|
| NOV1ak, SNP13376277 of | SEQ ID NO: 74 | | MW at 72009.8 kD |
| CG104903-03, Protein Sequence | SNP Pos: 370 | 644 aa | SNP Change: Cys to Arg |

MKLITILFLCSRLLLSLTQESQSEEIDCNDKDLFKAVDAALKKYNSQNQSNNQFVLYRITEATKTVGS
DTFYSFKYEIKEGDCPVQSGKTWQDCEYKDAAKAATGECTATVGKRSSTKFSVATQTCQITPAEGPVV
TAQYDCLGCVHPISTQSPDLEPILRHGIQYFNNNTQHSSLFMLNEVKRAQRQVVAGLNFRITYSIVQT
NCSKENFLFLTPDCKSLWNGDTGECTDNAYIDIQLRIASFSQNCDIYPGKDFVQPPTKICVGCPRDIP
TNSPELEETLTHTITKLNAENNATFYFKIDNVKKARVQVVAGKKYFTDFVARETTCSKESNEELTESC
ETKKLGQSLDCNAEVYVVPWEKKIYPTVNRQPLGMISLMKRPPGFSPFRSSRIGEIKEETTVSPPHTS
MAPAQDEERDSGKEQGHTRRHDWGHEKQRKHNLGHGHKHERDQGHGHQRGHGLGHGHEQQHGLGHGHK
FKLDDDLEHQGGHVLDHGHKHKHGHGHGKHKNKGKKNGKHNGWKTEHLASSSEDSTTPSAQTQEKTEG
PTPIPSLAKPGVTVTFSDFQDSDLIATMMPPISPAPIQSDDDWIPDIQIDPNGLSFNPISDFPDTTSP
KGPGRPWKSVSEINPTTQMKESYYFDLTDGLS

| | | |
|---|---|---|
| | SEQ ID NO: 75 | 1981 bp |
| NOV1al, SNP13379163 of | ORF Start: ATG at 50 | ORF Stop: end of sequence |
| CG104903-03, DNA Sequence | SNP Pos: 1791 | SNP Change: T to C |

AATTCCGGTTGAAACCATCCCTCAGCTCCTAGAGGGAGATTGTTAGATCATGAAACTAATTACCATCC
TTTTCCTCTGCTCCAGGCTACTACTAAGTTTAACCCAGGAATCACAGTCCGAGGAAATTGACTGCAAT
GACAAGGATTTATTTAAAGCTGTGGATGCTGCTCTGAAGAAATATAACAGTCAAAACCAAAGTAACAA
CCAGTTTGTATTGTACCGCATAACTGAAGCCACTAAGACGGTTGGCTCTGACACGTTTTATTCCTTCA
AGTACGAAATCAAGGAGGGGGATTGTCCTGTTCAAAGTGGCAAAACCTGGCAGGACTGTGAGTACAAG
GATGCTGCAAAAGGAGCCACTGGAGAATGCAGGGCAACCGTCGGGAAGAGGAGCAGTACGAAATTCTC
CGTGGCTACCCAGACCTGCCAGATTACTCCAGCCGAGGGCCCTGTGGTGACAGCCCAGTACGACTGCC
TCGGCTGTGTGCATCCTATATCAACGCAGAGCCCAGACCTGGAGCCCATTCTGAGACACGGCATTCAG
TACTTTAACAACAACACTCAACATTCCTCCCTCTTCATGCTTAATGAAGTAAAACGGGCCCAAAGACA
GGTGGTGGCTGGATTGAACTTTCGAATTACCTACTCAATTGTGCAAACGAATTGTTCCAAAGAGAATT
TTCTGTTCTTAACTCCAGACTGCAAGTCCCTTTGGAATGGTGATACCGGTGAATGTACAGATAATGCA
TACATCGATATTCACCTACGAATTGCTTCCTTCTCACAGAACTGTGACATTTATCCAGGGAAGGATTT
TGTACAACCACCTACCAAGATTTGCGTGGGCTGCGCCAGAGATATACCCACCAACAGCCCAGAGCTGG
AGGAGACACTGACTCACACCATCACAAAGCTTAATGCAGAGAATAACGCAACTTTGTATTTCAAGATT
GACAATGTGAAAAAAGCAAGAGTACAGGTGGTGGCTGGCAAGAAATATTTTATTGACTTCGTGGCCAG
GGAAACCACATGTTCCAAGGAAAGTAATGAAGAGTTGACCGAAAGCTGTGAGACCAAAAAACTTGGCC
AAAGCCTACATTGCAACGCTGAAGTTTATGTGGTACCCTGGGAGAAAAAAATTTACCCTACTGTCAAC
TGTCAACCACTGGGAATGATCTCACTGATGAAAAGGCCTCCACGTTTTTCACCTTTCCGATCATCACG
AATAGGGGAAATAAAAGAAGAAACAACTGTAAGTCCACCCCACACTTCCATGGCACCTGCACAAGATG
AAGAGCGGGATTCAGGAAAAGAACAAGGGCATACTCGTAGACATGACTGGGGCCATGAAAAACAAAGA
AAACATAATCTTGGCCATGGCCATAAACATGAACGTGACCAAGGGCATGGGCACCAAAGAGGACATGG
CCTTGGCCATGGACACGAACAACAGCATGGTCTTGGTCATGGACATAAGTTCAAACTTGATGATGATC
TTGAACACCAAGGGGGCCATGTCCTTGACCATGGACATAAGCATAAGCATGGTCATGGCCACGGAAAA
CATAAAAATAAAGGCAAAAAGAATGGAAAGCACAATGGTTGGAAAACAGAGCATTTGGCAAGCTCTTC
TGAAGACAGTACTACACCTTCTGCACAGACACAAGAGAAGACAGAAGGGCCAACACCCATCCCTTCCC
TAGCCAAGCCAGGTGTAACAGTTACCTTTTCTGACTTTCAGGACTCTGATCTCATTGCAACTATGATG
CCTCCTATATCACCAGCTCCCACACAGAGTGATGACGATTGGATCCCTGATATCCAGATAGACCCAAA
TGGCCTTTCATTTAACCCAATATCAGATTTTCCAGACACGACCTCCCCAAAATGTCCTGGACGCCCCT
GGAAGTCAGTTAGTGAAATTAATCCAACCACACAAATGAAAGAATCTTATTATTTCGATCTCACTGAT
GGCCTTTCT

| | | | |
|---|---|---|---|
| NOV1al, SNP13379163 of | SEQ ID NO: 76 | | MW at 71944.7 kD |
| CG104903-03, Protein Sequence | SNP Pos: 581 | 644 aa | SNP Change: Ile to Thr |

MKLITILFLCSRLLLSLTQESQSEEIDCNDKDLFKAVDAALKKYNSQNQSNNQFVLYRITEATKTVGS
DTFYSFKYEIKEGDCPVQSGKTWQDCEYKDAAKAATGECTATVGKRSSTKFSVATQTCQITPAEGPVV
TAQYDCLGCVHPISTQSPDLEPILRHGIQYFNNNTQHSSLFMLNEVKRAQRQVVAGLNFRITYSIVQT
NCSKENFLFLTPDCKSLWNGDTGECTDNAYIDIQLRIASFSQNCDIYPGKDFVQPPTKICVGCPRDIP
TNSPELEETLTHTITKLNAENNATFYFKIDNVKKARVQVVAGKKYFIDFVARETTCSKESNEELTESC
ETKKLGOSLDCNAEVYVVPWEKKIYPTVNCOPLGMISLMKRPPGFSPFRSSRIGEIKEETTVSPPHTS
MAPAQDEERDSGKEQGHTRRHDWGHEKQRKHNLGHGHKHERDQGHGHQRGHGLGHGHEQQHGLGHGHK
FKLDDDLEHQGGHVLDHGHKHKHGHGHGKHKNKGKKNGKHNGWKTEHLASSSEDSTTPSAQTQEKTEG
PTPIPSLAKPGVTVTFSDFQDSDLIATMMPPISPAPTQSDDDWIPDIQIDPNGLSFNPISDFPDTTSP
KGPGRPWKSVSEINPTTQMKESYYFDLTDGLS

[0307] A ClustalW comparison of the above protein sequences yields the following sequence alignment shown in Table 1B.

TABLE 1B
Comparison of the NOV1 protein sequences.

| | |
|---|---|
| NOV1a | -----MKLITILFLCSRLLLSLTQESQSEEIDCNDKDLFKAVDAALKKYNSQNQSNNQFV |
| NOV1b | ------------------------------------------------------------ |
| NOV1c | HRGRTMKLITILFLCSRLLLSLTQESQSEEIDCNDKDLFKAVDAALKKYNSQNQSNNQFV |
| NOV1d | ------------------------------------------------------------ |
| NOV1e | ------------------------------------------------------------ |
| NOV1f | ------------------------------------------------------------ |
| NOV1g | ----------------------------------TRSPTDCNDKDLFKAVDAALKKYNSQ |
| NOV1h | ----------------------------EEIDCNDKDLFKAVDAALKKYNSQNQSNNQFV |
| NOV1i | -----------------------------------------TRSEEIDCNDKDLFKAVDA |
| NOV1j | ------------------------------------------------------------ |
| NOV1k | ------------------------------------------------------------ |
| NOV1l | ------------------------------------------------------------ |
| NOV1m | ------------------------------------------------------------ |
| NOV1n | ------------------------------------------------------------ |
| NOV1o | ------------------------------------------------------------ |
| NOV1p | ------------------------------------------------------------ |
| NOV1q | ------------------------------------------------------------ |
| NOV1r | ------------------------------------------------------------ |
| NOV1s | ------------------------------------------------------------ |
| NOV1t | ------------------------------------------------------------ |
| NOV1u | ------------------------------------------------------------ |
| NOV1v | ----------------------------EEIDCNDKDLFKAVDAALKKYNSQNQSNNQFV |
| NOV1w | ------------------------------------------------------------ |
| NOV1x | ------------------------------------------------------------ |
| NOV1y | ------------------------------------------------------------ |
| NOV1z | -----MKLITILFLCSRLLLSLTQESQSEEIDCNDKDLFKAVDAALKKYNSQNQSNNQFV |
| NOV1a | LYRITEATKTVGSDTFYSFKYEIKEGDCPVQSGKTWQDCEYKDAAKAATGECTATVGKRS |
| NOV1b | -MKLITILFLCSRLLLSLTQESQSEEIDCNDKDLFKAVDAALKKYNSQNQSNNQFVLYRI |
| NOV1c | LYRITEATKTVGSDTFYSFKYEIKEGDCPVQSGKTWQDCEYKDAAKAATGECTATVGKRS |
| NOV1d | ------------------------------------------------------------ |
| NOV1e | ------------------------------------------------------------ |
| NOV1f | ------------------------------------------------------------ |
| NOV1g | NQSNNQFVLYRITEATKTVGSDTFYSFKYEIKEGDCPVQSGKTWQDCEYKDAAKAATGEC |
| NOV1h | LYRITEATKTVGSDTFYSFKYEIKEGDCPVQSGKTWQDCEYKDAAKAATGECTATVGKRS |
| NOV1i | ALKKYNSQNQSNNQFVLYRITEATKTVGSDTFYSFKYEIKEGDCPVQSGKTWQDCEYKDA |
| NOV1j | ------------------------------------------------------------ |
| NOV1k | ----------------------MKLITILFLCSRLLLSLTQESQSEEIDDCNDKDLFKAV |
| NOV1l | ------------------------------------------------------------ |
| NOV1m | ------------------------------------------------------------ |
| NOV1n | ------------------------------------------------------------ |
| NOV1o | ------------------------------------------------------------ |
| NOV1p | ------------------------------------------------------------ |
| NOV1q | ------------------------------------------------------------ |
| NOV1r | ------------------------------------------------------------ |
| NOV1s | ------------------------------------------------------------ |
| NOV1t | ------------------------------------------------------------ |
| NOV1u | ------------------------------------------------------------ |
| NOV1v | LYRITEATKTVGSDTFYSFKYEIKEGDCPVQSGKTWQDCEYKDAAKAATGECTATVGKRS |
| NOV1w | ------------------------------------------------------------ |
| NOV1x | ------------------------------------------------------------ |
| NOV1y | ------------------------------------------------------------ |
| NOV1z | LYRITEATKTVGSDTFYSFKYEIKEGDCPVQSGKTWQDCEYKDAAKAATGECTATVGKRS |
| NOV1a | STKFSVATQTCQITPAEGPVVTAQYDCLGCVHPISTQSPDLEPILRHGIQYFNNNTQHSS |
| NOV1b | TEATKTVGSDTFYSFKYEIKEGDCPVQSGKTWQDCEYKDAAKAATGECTATVGKRSSTKF |
| NOV1c | STKFSVATQTCQITPAEGPVVTAQYDCLGCVHPISTQSPDLEPILRHGIQYFNNNTQHSS |
| NOV1d | ------------------------------------------------------------ |
| NOV1e | ------------------------------------------------------------ |
| NOV1f | ------------------------------------------------------------ |
| NOV1g | TATVGKRSSTKFSVATQTCQITPAEGPVVTAQYDCLGCVHPISTQSPDLEPILRHGIQYF |
| NOV1h | STKFSVATQTCQITPAEGPVVTAQYDCLGCVHPISTQSPDLEPILRHGIQYFNNNTQHSS |
| NOV1i | AKAATGECTATVGKRSSTKFSVATQTCQITPAEGPVVTAQYDCLGCVHPISTQSPDLEPI |
| NOV1j | ------------------------------------------------------------ |
| NOV1k | DAALKKYNSQNQSNNQFVLYRKTWQDCEYKDAAKAATGECTATVGKRSSTKFSVATQTCQ |
| NOV1l | ------------------------------------------------------------ |
| NOV1m | ------------------------------------------------------------ |
| NOV1n | ------------------------------------------------------------ |
| NOV1o | ------------------------------------------------------------ |
| NOV1p | ------------------------------------------------------------ |
| NOV1q | ------------------------------------------------------------ |
| NOV1r | ------------------------------------------------------------ |
| NOV1s | ------------------------------------------------------------ |
| NOV1t | ------------------------------------------------------------ |
| NOV1u | ------------------------------------------------------------ |
| NOV1v | STKFSVATQTCQITPAEGPVVTAQYDCLGCVHPISTQSPDLEPILRHGIQYFNNNTQHSS |
| NOV1w | ------------------------------------------------------------ |
| NOV1x | ------------------------------------------------------------ |
| NOV1y | ------------------------------------------------------------ |
| NOV1z | STKFSVATQTCQITPAEGPVVTAQYDCLGCVHPISTQSPDLEPILRHGIQYFNNNTQHSS |
| NOV1a | LFMLNEVKRAQRQVVAGLNFRITYSIVQTNCSKENFLFLTPDCKSLWNGDTGECTDNAYI |
| NOV1b | SVATQTCQITPAEGPVVTAQYDCLGCVHPISTQSPDLEPILRHGIQYFNNNTQHSSLFML |
| NOV1c | LFTLNEVKEAQRQVVAGLNFRITYSIVQTNCSKENFLFLTPDCKSLWNGDTGECTDNAYI |
| NOV1d | ------------------------------------------------------------ |
| NOV1e | ------------------------------------------------------------ |
| NOV1f | ------------------------------------------------------------ |
| NOV1g | NNNTQHSSLFMLNEVKRAQRQVVAGLNFRITYSIVQTNCSKENFLFLTPDCKSLWNGDTG |
| NOV1h | LFMLNEVKRAQRQVVAGLNFRITYSIVQTNCSKENFLFLTPDCKSLWNGDTGECTDNAYI |
| NOV1i | LRHGIQYFNNNTQHSSLFMLNEVKRAQRQVVAGLNFRITYSIVQTNCSKENFLFLTPDCK |
| NOV1j | ------------------------------------------------------------ |
| NOV1k | ITPAEGPVVTAQYDCLGCVHPISTQSPDLEPILRHGIQYFNNNTQHSSLFTLNEVKRAQR |
| NOV1l | ------------------------------------------------------------ |
| NOV1m | ------------------------------------------------------------ |
| NOV1n | ------------------------------------------------------------ |
| NOV1o | ------------------------------------------------------------ |
| NOV1p | ------------------------------------------------------------ |
| NOV1q | ------------------------------------------------------------ |
| NOV1r | ------------------------------------------------------------ |
| NOV1s | ------------------------------------------------------------ |
| NOV1t | ------------------------------------------------------------ |
| NOV1u | ------------------------------------------------------------ |
| NOV1v | LFMLNEVKRAQRQVVAGLNFRITYSIVQTNCSKENFLFLTPDCKSLWNGDTGECTDNAYI |
| NOV1w | ------------------------------------------------------------ |
| NOV1x | ------------------------------------------------------------ |
| NOV1y | ------------------------------------------------------------ |
| NOV1z | LFTLNEVKRAQRQVVAGLNFRITYSIVQTNCSKENFLFLTPDCKSLWNGDTGECTDNAYI |
| NOV1a | DIQLRIASFSQNCDIYPGKDFVQPPTKICVCCPRDIPTNSPELEETLTHTITKLNAENNA |
| NOV1b | NEVKRAQRQVVAGLNFRITYSIVQTNCSKENFLFLTPDCKSLWNGDTGECTDNAYIDIQL |
| NOV1c | DIQLRIASFSQNCDIYPGKDFVQPPTKICVGCPRDIPTNSPELEETLTHTITKLNAENNA |
| NOV1d | ------------------------------------------------------------ |
| NOV1e | ------------------------------------------------------------ |
| NOV1f | ------------------------------------------------------------ |
| NOV1g | ECTDNAYIDIQLRIASFSQNCDIYPGKDFVQPPTKICVGCPRDIPTNSPELEETLTHTIT |
| NOV1h | DIQLRIASFSQNCDIYPGKDFVQPPTKICVGCPRDIPTNSPELEETLTHTITKLNAENNA |
| NOV1i | SLWNGDTGECTDNAYIDIQLRIASFSQNCDIYPGKDFVQPPTKICVGCPRDIPTNSPELE |
| NOV1j | ------------------------------------------------------------ |
| NOV1k | QVVAGLNFRITYSIVQTNCSKENFLFLTPDCKSLWNGDTGECTDNAYIDIQLRIASFSQN |
| NOV1l | ------------------------------------------------------------ |
| NOV1m | --------------------------------------------------MKLITILFLC |
| NOV1n | ------------------------------------------------------------ |
| NOV1o | ------------------------------------------------------------ |
| NOV1p | ------------------------------------------------------------ |
| NOV1q | ------------------------------------------------------------ |
| NOV1r | ------------------------------------------------------------ |
| NOV1s | ------------------------------------------------------------ |
| NOV1t | ------------------------------------------------------------ |
| NOV1u | ------------------------------------------------------------ |
| NOV1v | DIQLRIASFSQNCDIYPGKDFVQPPTKICVGCPRDIPTNSPELEETLTHTITKLNAENNA |
| NOV1w | ------------------------------------------------------------ |
| NOV1x | ------------------------------------------------------------ |
| NOV1y | ------------------------------------------------------------ |
| NOV1z | DIQLRIASFSQNCDIYPGKDFVQPPTKICVGCPRDIPTNSPELEETLTHTITKLNAENNA |
| NOV1a | TFYFKIDNVKKARVQVVAGKKYFIDFVARETTCSKESNEELTESCETKKLGQSLDCNAEV |
| NOV1b | RIASFSQNCDIYPGKDFVQPPTKICVGCPRDIPTNSPELEETLTHTITKLNAENNATFYF |
| NOV1c | TFYFKIDNVKKARVQVVAGKKYFIDFVARETTCSKESNEELTESCETKKLGQSLDCNAEV |
| NOV1d | ------------------------------------------------------------ |
| NOV1e | ------------------------------------------------------------ |
| NOV1f | ------------------------------------------------------------ |
| NOV1g | KLNAENNATFYFKIDNVKKARVQVVAGKKYFIDFVARETTCSKESNEELTESCETKKLGQ |
| NOV1h | TFYFKIDNVKKARVQVVAGKKYFIDFVARETTCSKESNEELTESCETKKLGQSLDCNAEV |
| NOV1i | ETLTHTITKLNAENNATFYFKIDNVKKARVQVVAGKKYFIDFVARETTCSKESNEELTES |
| NOV1j | ------------------------------------------------------------ |
| NOV1k | CDIYPGKDFVQPPTKICVGCPRDIPTNSPELEETLTHTITKLNAENNATFYFKIDNVKKA |
| NOV1l | ------------------------------------------------------------ |
| NOV1m | SRLLLSLTQESQSEEIDCNDKDLFKAVDAALKKYNSQNQSNNQFVLYRITEATKTVGSDT |
| NOV1n | ------------------------------------------------------------ |
| NOV1o | ------------------------------------------------------------ |
| NOV1p | ------------------------------------------------------------ |
| NOV1q | ------------------------------------------------------------ |
| NOV1r | ------------------------------------------------------------ |
| NOV1s | ------------------------------------------------------------ |
| NOV1t | ------------------------------------------------------------ |
| NOV1u | ------------------------------------------------------------ |
| NOV1v | TFYFKIDNVKKARVQVVAGKKYFIDFVARETTCSKESNEELTESCETKKLGQSLDCNAEV |
| NOV1w | ------------------------------------------------------------ |
| NOV1x | ------------------------------------------------------------ |
| NOV1y | ------------------------------------------------------------ |
| NOV1z | TFYFKIDNVKKARVQVVAGKKYFIDFVARETTCSKESNEELTESCETKKLGQSLDCNAEV |
| NOV1a | YVVPWEKKIYPTVNCQPLGMISLMKRPPGFSPFRSSRIGEIKEETTVSPPHTSMAPAQDE |
| NOV1b | KIDNVKKARVQVVAGKKYFIDFVARETTCSKESNEELTESCETKKLGQSLDCNAEVYVVP |
| NOV1c | YVVPWEKKIYPTVNCQPLGMISLMKRPPGFSPFRSSRIGEIKEETTVSPPHTSMAPAQDE |
| NOV1d | -----------------------------------------------------------T |
| NOV1e | ------------------------------------------------------------ |
| NOV1f | -------------------------TRSGFSPFRSSRIGEIKEETTVSPPHTSMAPAQDE |
| NOV1g | SLDCNAEVYVVPWEKKIYPTVNCQPLGMISLMKRPPGFSPFRSSRIGEIKEETTVSPPHT |
| NOV1h | YVVPWEKKIYPTVNCQPLGMISLMKRPPGFSPFRSSRIGEIKEETTVSPPHTSMAPAQDE |
| NOV1i | CETKKLGQSLDCNAEVYVVFWEKKIYPTVNCQPLGMISLMKRPPGFSPFRSSRIGEIKEE |
| NOV1j | ------------------------------------------------------------ |
| NOV1k | RVQVVAGKKYFIDFVARETTCSKESNEELTESCETKKLGQSLDCNAEVYVVPWEKKIYPT |
| NOV1l | ------------------------------------------------------------ |
| NOV1m | FYSFKYEIKEGDCPVQSGKTWQDCEYKDAAKAATGECTATVCKRSSTKFSVATQTCQITP |
| NOV1n | ------------------------------------------------------------ |
| NOV1o | ------------------------------------------------------------ |
| NOV1p | ------------------------------------------------------------ |
| NOV1q | ------------------------------------------------------------ |
| NOV1r | ------------------------------------------------------------ |
| NOV1s | ------------------------------------------------------------ |
| NOV1t | ------------------------------------------------------------ |
| NOV1u | ------------------------------------------------------------ |
| NOV1v | YVVPWEKKIYPTVNCQPLGMISLMKRPPGFSPFRSSRIGEIKEETTVSPPHTSMAPAQDE |
| NOV1w | ------------------------------------------------------------ |
| NOV1x | ------------------------------------------------------------ |
| NOV1y | ----------------------------GFSPFRSSRIGEIKEETTVSPPHTSMAPAQDE |
| NOV1z | YVVPWEKKIYPTVNCQPLGMISLMKRPPGFSPFRSSRIGEIKEETTVSPPHTSMAPAQDE |
| NOV1a | ERDSGKEQGHTRRHDWGHEKQRKHNLGHGHKHERDQGHGHQRGHGLGHGHEQQHGLGHGH |
| NOV1b | WEKKIYPTVNCQPLGMISLMKRPPGFSPFRSSRIGEIKEETTVSPPHTSMAFAQDEERDS |
| NOV1c | ERDSGKEQGHTRRHDWGHEKQRKHNLGHGHKHERDQGHGHQRGHGLGHGHEQQHGLGHGH |
| NOV1d | RSAPAQDEERDSGKEQGHTRRHDWGHEKQRKHNLGHGHKHERDQGHGHQRGHGLGHGHEQ |
| NOV1e | -----------------------------------------------TRSPTMKLITILF |
| NOV1f | ERDSGKEQGHTRRHDWGHEKQRKHNLGHGHKHERDQGHCHQRGHGLGHGHEQQHGLGHGH |
| NOV1g | SMAPAQDEERDSGKEQGHTRRHDWGHEKQRKHNLGHGHKHERDQGHGHQRGHGLGHGHEQ |
| NOV1h | ERDSGKEQGHTRRHDWGHEKQRKHNLGHGHKHERDQGHGHQRGHGLGHGHEQQHGLGHGH |
| NOV1i | TTVSPPHTSMAPAQDEERDSGKEQGHTRRHDWGHEKQRKHNLGHGHKHERDQGHGHQRGH |
| NOV1j | ----------------------------------------------------MKLITILF |
| NOV1k | VNCQPLGMISLMKRPPCFSPFRSSRIGEIKEETTVSPPHTSMAPAQDEERDSGKEQGHTR |
| NOV1l | ----------------------------------------------------MKLITILF |
| NOV1m | AEGPVVTAQYDCLGCVHPISTQSPGFSPFRSSRIGEIKEETTVSPPHTSMAPAQDEERDS |
| NOV1n | ----------------------------------------------------MKLITILF |
| NOV1o | ----------------------------------------------------MKLITILF |
| NOV1p | ----------------------------------------------------MKLITILF |
| NOV1q | ------------------------------------------------------------ |
| NOV1r | ------------------------------------------------------------ |
| NOV1s | ------------------------------------------------------------ |
| NOV1t | ------------------------------------------------------------ |
| NOV1u | ------------------------------------------------------------ |
| NOV1v | ERDSGKEQHHTRRHDWGHEKQRKHNLGHGHKHERDQGHGHQRGHGLGHGHEQQHGLGHGH |
| NOV1w | ----------------------------------------------------MKLITILF |
| NOV1x | ----------APAQDEERDSGKEQGHTRRHDWGHEKQRKHNLGHGHKHERDQGHGHQRGH |
| NOV1y | ERDSGKEQGHTRRHDWGHEKQRKHNLGHGHKHERDQGHGHQRGHGLGHGHEQQHGLGHGH |
| NOV1z | ERDSGKEQGHTRRHDWGHEKQRKHNLGHGHKHERDQGHGHQRGHGLGHGHEQQHOLGHGH |
| NOV1a | KFKLDDDLEHQGGHVLDHGHKHKHGHCHGKHKNKGKKNGKHNGWKTEHLASSSEDSTTPS |
| NOV1b | GKEQGHTRRHDWGHEKQRKHNLGHGHKHERDQGHGHQRGHGLGHGHEQQHGLGHGHKFKL |
| NOV1c | KFKLDDDLEHQGGHVLDHGHKHKHGHGHOKHKNKGKKNGKHNGWKTEHLASSSEDSTTPS |
| NOV1d | QHGLGHGHKFKLDDDLEHQGGHVLDHGNKHKHGHGHGKHKNKGKKNGKHNGVDG------ |
| NOV1e | LCSRLLLSLTQESQSE-EIDCNDKDLFKAVDAALKKYNSQNQSNNQFVLYRITEATKTVG |
| NOV1f | KFKLDDDLEHQGGHVLDHGHKHKHGHGHGKHKNKGKKNGKHNGWKTEHLASSSEDSTTPS |
| NOV1g | QHGLGHGHKFKLDDDLEHQGGHVLDHGHKHKHGHGHGKHKNKGKKNGKHNGWKTEHLASS |
| NOV1h | KFKLDDDLEHQGGHVLDHGHKHKHGHGHGKHKNKGKKNGKHNGWKTEHLASSSEDSTTPS |
| NOV1i | GLGHGHEQQHGLGHGHKFKLDDDLEHQGGHVLDHGHKHKHGHGHGKHKNKGKKNGKHNGW |
| NOV1j | LCSRLLLSLTQESQSEEIDDCNDKDLFKAVDAALKKYNSQNQSNNQFVLYR--------- |
| NOV1k | RHDWGHEKQRKHNLGHGHKHERDQGHGHQRGHGLGHGHEQQHGLGHGHKFKLDDDLEHQG |
| NOV1l | LCSRLLLSLTQESQSE-EIDCNDKDLFKAVDAALKKYNSQNQSNNQFVLYRITEATKTVG |
| NOV1m | GKEQGHTRRHDWGHEKQRKHNLGHGHKHERDQGHGHQRGHGLGHGHEQQHGLGHGHKFKL |
| NOV1n | LCSRLLLSLTQESQSE-EIDCNDKDLFKAVDAALKKYNSQNQSNNQFVLYRITEATKTVG |
| NOV1o | LCSRLLLSLTQESQSEEIDDCNDKDLFKAVDAALKKYNSQNQSNNQFVLYR--------- |
| NOV1p | LCSRLLLSLTQESQSE-EIDCNDKDLFKAVDAALKKYNSQNQSNNQFVLYR--------- |
| NOV1q | ------------------------------HKNKGKKNGKHNGWKT-------------- |
| NOV1r | ------------------------------KHGHGHGKHKNKGKKN-------------- |
| NOV1s | ------------------------------VLDHGHKHKHGHGHGK-------------- |
| NOV1t | ------------------------------GHGLGHGHEQQHGLGH-------------- |
| NOV1u | ------------------------------DQGHGHQRGHGLGHGH-------------- |
| NOV1v | KFKLDDDLEHQGGHVLDHGHKHKHGHGHGKHKNKGKKNGKHNGWKTEHLASSSEDSTTPS |
| NOV1w | LCSRLLLSLTQESQSE-EIDCNDKDLFKAVDAALKKYNSQNQSNNQFVLYRITEATKTVG |
| NOV1x | GLGHGHEQQHGLGHGHKFKLDDDLEHQGGHVLDHGHKHKHGHGHGKHKNKGKKNCKHNG- |
| NOV1y | KFKLDDDLEHQGGHVLDHGHKHKHCHGHGKHKNKGKKNGKHNGWKTEHLASSSEDSTTPS |
| NOV1z | KFKLDDDLEHQGGHVLDHGHKHKHGHGHGKHKNKGKKNGKHNGWKTEHLASSSEDSTTPS |
| NOV1a | AQTQEKTEGPTPIPSLAKPGVTVTFSDFQDSDLIATMMPPISPAPIQSDDDWIPDIQIDP |
| NOV1b | DDDLEHQGGHVLDHGHKHKHGHGHGKHKNKGKKNGKHNGWKTEHLASSSEDSTTPSAQTQ |
| NOV1c | AQTQEKTEGPTPIPSLAKPGVTVTFSDFQDSDLIATMMPPISPAPIQSDDDWIPDIQIDP |
| NOV1d | ------------------------------------------------------------ |
| NOV1e | SDTFYSFKYEIKEGDCPVQSGKTWQDCEYKDAAKAATGECTATVGKRSSTKFSVATQTCQ |
| NOV1f | AQTQEKTEGPTPIPSLAKPGVTVTFSDFQDSDLIATMMPPISPAPIQSDDDWIPDIQIDP |
| NOV1g | SEDSTTPSAQTQEKTEGPTPIPSLAKPGVTVTFSDFQDSDLIATMMPPISPAPIQSDDDW |
| NOV1h | AQTQEKTEGPTPIPSLAKPGVTVTFSDFQDSDLIATMMPPISPAPIQSDDDWIPDIQIDP |
| NOV1i | KTEHLASSSEDSTTPSAQTQEKTEGPTPIPSLAKPGVTVTFSDFQDSDLIATMMPPISPA |
| NOV1j | ---------------------KTWQDCEYKDAAKAATGECTATVGKRSSTKFSVATQTCQ |
| NOV1k | GHVLDHGHKHKHGHGHGKHKNKGKKNGKHNGWKTEHLASSSEDSTTPSAQTQEKTEGPTP |
| NOV1l | SDTFYSFKYEIKEGDCPVQSGKTWQDCEYKDAAKAATGECTATVGKRSSTKFSVATQTCQ |
| NOV1m | DDDLEHQGGHVLDHGHKHKHGHGHGKHKNKGKKNGKHNGWKTEHLASSSEDSTTPSAQTQ |
| NOV1n | SDTFYSFKYEIKEGDCPVQSGKTWQDCEYKDAAKAATGECTATVGRG-------AVRNSP |
| NOV1o | ---------------------KTWQDCEYKDAAKAATGECTATVGKRSSTKFSVATQTCQ |
| NOV1p | ---------------------------IT-EATKTATGECTATVGKRSSTKFSVATQTCQ |
| NOV1q | ------------------------------------------------------------ |
| NOV1r | ------------------------------------------------------------ |
| NOV1s | ------------------------------------------------------------ |
| NOV1t | ------------------------------------------------------------ |
| NOV1u | ------------------------------------------------------------ |
| NOV1v | AQTQEKTEGPTPIPSLAKPGVTVTFSDFQDSDLIATMMPPISPAPIQSDDDWIPDIQIDP |
| NOV1w | SDTFYSFKYEIKEGDCPVQSGKTWQDCEYKDAAKAATGECTATVGKRSSTKFSVATQTCQ |
| NOV1x | ------------------------------------------------------------ |
| NOV1y | AQTQEKTEGPTPIPSLAKPGVTVTFSDFQDSDLIATMMPPISPAPIQSDDDWIPDIQIDP |
| NOV1z | AQTQEKTEGPTPIPSLAKPGVTVTFSDFQDSDLIATMMPPISPAPIQSDDDWIPDIQIDP |
| NOV1a | NGLSFNPISDFPDTTSPKCPGRPWKSVSEINPTTQMKESYYFDLTDGLS----------- |
| NOV1b | EKTEGPTPIPSLAKPGVTVTFSDFQDSDLIATMMPPISPAPIQSDDDWIPDIQIDPNGLS |
| NOV1c | NGLSFNPISDFPDTTSPKCPGRPWKSVSEINPTTQMKESYYFDLTDGLS----------- |
| NOV1d | ------------------------------------------------------------ |
| NOV1e | ITPAEGPVVTAQYDCLGCVHPISTQSPDLEPILRHCIQYFNNNTQHSSLFMLNEVKRAQR |
| NOV1f | NGLSFNPISDFPDTTSPKCPGRPWKSVSEINLEG-------------------------- |
| NOV1g | IPDIQIDPNGLSFNPISDFPDTTSPKCPGRPWKSVSEINPTTQMKESYYFDLTLEG---- |
| NOV1h | NGLSFNPISDFPDTTSPKCPGRPWKSVSEINPTTQMKESYYFDLTDCLS----------- |
| NOV1i | PIQSDDDWIPDIQIDPNGLSFNPISDFPDTTSPKCPGRPWKSVSEINPTTQMKESYYFDL |
| NOV1j | ITPAEGPVVTAQYDCLGCVHPISTQSPDLEPILRHGIQYFNNNTQHSSLFTLNEVKRAQR |
| NOV1k | IPSLAKPGVTVTFSDFQDSDLIATMMPPISPAPIQSDDDWIPDIQTDPNGLSFNPISDFP |
| NOV1l | ITPAEGPVVTAQYDCLGCVHPISTQSPDLEPILRHGIQYFNNNTQHSSLFMLNEVKRAQR |
| NOV1m | EKTEGPTPIPSLAKPGVTVTFSDFQDSDLIATMMPPISPAPIQSDDDWIPDIQIDPNGLS |
| NOV1n | WLPRPGAHSETRHSVL-------------------------------------------- |
| NOV1o | ITPAEGPVVTAQYDCLGCVHPISTQS---------P------------------------ |
| NOV1p | ITPAEGPVVTAQYDCLGCVHPISTQSPDLEPILRHGIQYFNNNTQHSSLFTLNEVKRAQR |
| NOV1q | ------------------------------------------------------------ |
| NOV1r | ------------------------------------------------------------ |
| NOV1s | ------------------------------------------------------------ |
| NOV1t | ------------------------------------------------------------ |
| NOV1u | ------------------------------------------------------------ |
| NOV1v | NGLSFNPISDFPDTTSPKCPGRPWKSVSEINPTTQMKESYYFDLTDGLS----------- |
| NOV1w | ITPAEGPVVTAQYDCLGCVHPISTQSPDLEPILRHGIQYFNNNTQHSSLFMLNEVKRAQR |
| NOV1x | ------------------------------------------------------------ |
| NOV1y | NGLSFNPISDFPDTTSPKCPGRPWKSVSEIN----------------------------- |
| NOV1z | NGLSFNPISDFPDTTSPKCPGRPWKSVSEINPTTQMKESYYFDLTDGLS----------- |
| NOV1a | ------------------------------------------------------------ |
| NOV1b | FNPISDFPDTTSPKCPGRPWKSVSEINPTTQMKESYYFDLTDGLS--------------- |
| NOV1c | ------------------------------------------------------------ |
| NOV1d | ------------------------------------------------------------ |
| NOV1e | QVVAGLNFRITYSIVQTNCSKENFLFLTPDCKSLWNGDTGECTDNAYIDIQLRIASFSQN |
| NOV1f | ------------------------------------------------------------ |
| NOV1g | ------------------------------------------------------------ |
| NOV1h | ------------------------------------------------------------ |
| NOV1i | TDGLSVDG---------------------------------------------------- |
| NOV1j | QVVAGLNFRITYSIVQTNCSKENFLFLTPDCKSLWNGDTGECTDNAYIDIQLRIASFSQN |
| NOV1k | DTTSPKCPGRPWKSVSEINPTTQMKESYYFDLTDGLS----------------------- |
| NOV1l | QVVAGLNFRITYSIVQTNCSKENFLFLTPDCKSLWNGDTGECTDNAYIDIQLRIASFSQN |
| NOV1m | FNPISDFPDTTSPKCPGRPWKSVSEINPTTQMKESYYFDLTDGLS--------------- |
| NOV1n | ------------------------------------------------------------ |
| NOV1o | ------------------------------------------------------------ |
| NOV1p | QVVAGLNFRITYSIVQTNCSKENFLFLTPDCESLWNGDTGECTDNAYIDIQLRIASFSQN |
| NOV1q | ------------------------------------------------------------ |
| NOV1r | ------------------------------------------------------------ |
| NOV1s | ------------------------------------------------------------ |
| NOV1t | ------------------------------------------------------------ |
| NOV1u | ------------------------------------------------------------ |
| NOV1v | ------------------------------------------------------------ |
| NOV1w | QVVAGLNFRITYSIVQTNCSKENFLFLTPDCKSLWNGDTGECTDNAYIDIQLRIASFSQN |
| NOV1x | ------------------------------------------------------------ |
| NOV1y | ------------------------------------------------------------ |
| NOV1z | ------------------------------------------------------------ |
| NOV1a | ------------------------------------------------------------ |
| NOV1b | ------------------------------------------------------------ |
| NOV1c | ------------------------------------------------------------ |
| NOV1d | ------------------------------------------------------------ |
| NOV1e | CDIYPGKDFVQPPTKICVGCPRDIPTNSPELEETLTHTITKLNAENNATFYFKIDNVKKA |
| NOV1f | ------------------------------------------------------------ |
| NOV1g | ------------------------------------------------------------ |
| NOV1h | ------------------------------------------------------------ |
| NOV1i | ------------------------------------------------------------ |
| NOV1j | CDIYPGKDFVQPPTKICVGCPRDIPTNSPELEETLTHTITKLNAENNATFYFKIDNVKKA |
| NOV1k | ------------------------------------------------------------ |
| NOV1l | CDIYPGKDFVQPPTKICVGCPRDIPTNSPELEETLTHTITKLNAENNATFYFKIDNVKKA |
| NOV1m | ------------------------------------------------------------ |
| NOV1n | ------------------------------------------------------------ |
| NOV1o | ------------------------------------------------------------ |
| NOV1p | CDIYPGKDFVQPPTKICVGCPRDIPTNSPELEETLTHTITKLNAENNATFYFKIDNVKKA |
| NOV1q | ------------------------------------------------------------ |
| NOV1r | ------------------------------------------------------------ |
| NOV1s | ------------------------------------------------------------ |
| NOV1t | ------------------------------------------------------------ |
| NOV1u | ------------------------------------------------------------ |
| NOV1v | ------------------------------------------------------------ |
| NOV1w | CDIYPGKDFVQPPTKICVGCPRDIPTNSPELEETLTHTITKLNAENNATFYFKIDNVKKA |
| NOV1x | ------------------------------------------------------------ |
| NOV1y | ------------------------------------------------------------ |
| NOV1z | ------------------------------------------------------------ |
| NOV1a | ------------------------------------------------------------ |
| NOV1b | ------------------------------------------------------------ |
| NOV1c | ------------------------------------------------------------ |
| NOV1d | ------------------------------------------------------------ |
| NOV1e | RVQVVAGKKYFIDFVARETTCSKESNEELTESCETKKLGQSLDCNAEVYVLEG------- |
| NOV1f | ------------------------------------------------------------ |
| NOV1g | ------------------------------------------------------------ |
| NOV1h | ------------------------------------------------------------ |
| NOV1i | ------------------------------------------------------------ |
| NOV1j | RVQVVAGKKYFIDFVARETTCSKESNEELTESCETKKLGQSLDCNAEVYVVPWEKKIYPT |
| NOV1k | ------------------------------------------------------------ |
| NOV1l | RVQVVAGKKYFIDFVARETTCSKESNEELTESCETKKLGQSLDCNAEVYVVPWEKKIYPT |
| NOV1m | ------------------------------------------------------------ |
| NOV1n | ------------------------------------------------------------ |
| NOV1o | ------------------------------------------------------------ |
| NOV1p | RVQVVAGKKYFIDFVARETTCSKESNEELTESCETKKLGQSLDCNAEVYVVPWEKKIYPT |
| NOV1q | ------------------------------------------------------------ |
| NOV1r | ------------------------------------------------------------ |
| NOV1s | ------------------------------------------------------------ |
| NOV1t | ------------------------------------------------------------ |
| NOV1u | ------------------------------------------------------------ |
| NOV1v | ------------------------------------------------------------ |
| NOV1w | RVQVVAGKKYFIDFVARETTCSKESNEELTESCETKKLGQSLDCNAEVYV---------- |
| NOV1x | ------------------------------------------------------------ |
| NOV1y | ------------------------------------------------------------ |
| NOV1z | ------------------------------------------------------------ |
| NOV1a | ------------------------------------------------------------ |
| NOV1b | ------------------------------------------------------------ |
| NOV1c | ------------------------------------------------------------ |
| NOV1d | ------------------------------------------------------------ |
| NOV1e | ------------------------------------------------------------ |
| NOV1f | ------------------------------------------------------------ |
| NOV1g | ------------------------------------------------------------ |
| NOV1h | ------------------------------------------------------------ |
| NOV1i | ------------------------------------------------------------ |
| NOV1j | VNCQPLGMISLMKRPPGFSPFRSSRIGEIKEETTSHLRSCEYKGRPPKAGAEPASEREVS |
| NOV1k | ------------------------------------------------------------ |
| NOV1l | VNCQPLGMISLMKRPPGFSPFRSSRIGEIKEETTSHLRSCEYKGRPPKAGAEPASEREVS |
| NOV1m | ------------------------------------------------------------ |
| NOV1n | ------------------------------------------------------------ |
| NOV1o | ----------------GFSPFRSSRIGEIKEETTSHLRSCEYKGRPPKAGAEPASEREVS |
| NOV1p | VNCQPLGMISLMKRPPGFSPFRSSRIGEIKEETTSHLRSCEYKGRPPKAGAEPVSEREVS |
| NOV1q | ------------------------------------------------------------ |
| NOV1r | ------------------------------------------------------------ |
| NOV1s | ------------------------------------------------------------ |
| NOV1t | ------------------------------------------------------------ |
| NOV1u | ------------------------------------------------------------ |
| NOV1v | ------------------------------------------------------------ |
| NOV1w | ------------------------------------------------------------ |
| NOV1x | ------------------------------------------------------------ |
| NOV1y | ------------------------------------------------------------ |
| NOV1z | ------------------------------------------------------------ |
| NOV1a | (SEQ ID NO: 2) |
| NOV1b | (SEQ ID NO: 4) |
| NOV1c | (SEQ ID NO: 6) |
| NOV1d | (SEQ ID NO: 8) |
| NOV1e | (SEQ ID NO: 10) |
| NOV1f | (SEQ ID NO: 12) |
| NOV1g | (SEQ ID NO: 14) |
| NOV1h | (SEQ ID NO: 16) |
| NOV1i | (SEQ ID NO: 18) |
| NOV1j | (SEQ ID NO: 20) |
| NOV1k | (SEQ ID NO: 22) |
| NOV1l | (SEQ ID NO: 24) |
| NOV1m | (SEQ ID NO: 26) |
| NOV1n | (SEQ ID NO: 28) |
| NOV1o | (SEQ ID NO: 30) |
| NOV1p | (SEQ ID NO: 32) |
| NOV1q | (SEQ ID NO: 34) |
| NOV1r | (SEQ ID NO: 36) |
| NOV1s | (SEQ ID NO: 38) |
| NOV1t | (SEQ ID NO: 40) |
| NOV1u | (SEQ ID NO: 42) |
| NOV1v | (SEQ ID NO: 44) |
| NOV1w | (SEQ ID NO: 46) |
| NOV1x | (SEQ ID NO: 48) |
| NOV1y | (SEQ ID NO: 50) |
| NOV1z | (SEQ ID NO: 52) |

[0308] Further analysis of the NOV1a protein yielded the following properties shown in Table 1C.

TABLE 1C
Protein Sequence Properties NOV1a

| SignalP analysis: | Cleavage site between residues 24 and 25 | | | |
|---|---|---|---|---|
| PSORT II | PSG: a new signal peptide prediction method | | | |
| analysis: | N-region: length 2; pos.chg 1; neg.chg 0 | | | |
| | H-region: length 9; peak value 11.25 | | | |
| | PSG score: 6.85 | | | |
| | GvH: von Heijne's method for signal seq. recognition | | | |
| | GvH score (threshold: −2.1): 0.04 | | | |
| | possible cleavage site: between 18 and 19 | | | |
| | >>> Seems to have a cleavable signal peptide (1 to 18) | | | |
| | ALOM: Klein et al's method for TM region allocation | | | |
| | Init position for calculation: 19 | | | |
| | Tentative number of TMS(s) for the threshold 0.5: 0 | | | |
| | number of TMS(s) . . . fixed | | | |
| | PERIPHERAL Likelihood = 7.90 (at 135) | | | |
| | ALOM score: 7.90 (number of TMSs: 0) | | | |
| | MTOP: Prediction of membrane topology (Hartmann et al.) | | | |
| | Center position for calculation: 9 | | | |
| | Charge difference: −4.0 C(−2.0)-N(2.0) | | | |
| | N >= C: N-terminal side will be inside | | | |
| | MITDISC: discrimination of mitochondrial targeting seq | | | |
| | R content: | 1 | Hyd Moment(75): | 3.52 |
| | Hyd Moment (95): | 7.10 | G content: | 0 |
| | D/E content: | 1 | S/T content: | 4 |

Score: −3.12
Gavel: prediction of cleavage sites for mitochondrial preseq
R-2 motif at 22 SRL|LL
NUCDISC: discrimination of nuclear localization signals
pat4: none
pat7: none
bipartite: none
content of basic residues: 11.2%
NLS Score: −0.47
KDEL: ER retention motif in the C-terminus: none
ER Membrane Retention Signals: none
SKL: peroxisomal targeting signal in the C-terminus: none
PTS2: 2nd peroxisomal targeting signal: none
VAC: possible vacuolar targeting motif: none
RNA-binding motif: none
Actinin-type actin-binding motif:
type 1: none
type 2: none
NMYR: N-myristoylation pattern: none
Prenylation motif: none
memYQRL: transport motif from cell surface to Golgi: none
Tyrosines in the tail: none
Dileucine motif in the tail: none
checking 63 PROSITE DNA binding motifs: none
checking 71 PROSITE ribosomal protein motifs: none
checking 33 PROSITE prokaryotic DNA binding motifs: none
NNCN: Reinhardt's method for Cytoplasmic/Nuclear discrimination
Prediction: nuclear
Reliability: 89
COIL: Lupas's algorithm to detect coiled-coil regions
total: 0 residues
Final Results (k = 9/23):
66.7%: extracellular, including cell wall
22.2%: mitochondrial
11.1%: nuclear
>> prediction for CG104903-09 is exc (k = 9)

[0309] A search of the NOV1a protein against the Geneseq database, a proprietary database that contains sequences published in patents and patent publication, yielded several homologous proteins shown in Table 1D.

TABLE 1D
Geneseq Results for NOV1a

| | | | Identities/ | |
|---|---|---|---|---|
| | | | Similarities for | |
| Geneseq | Protein/Organism/Length | NOV1a Residues/ | the Matched | Expect |
| Identifier | [Patent #, Date] | Match Residues | Region | Value |
| ABG21101 | Novel human diagnostic protein | 1 . . . 644 | 644/644 (100%) | 0.0 |
| | #21092 - Homo sapiens, 644 aa. | 1 . . . 644 | 644/644 (100%) | |
| | [WO200175067-A2, 11 OCT. | | | |
| | 2001] | | | |
| ABB78710 | Human high molecular weight | 1 . . . 644 | 643/644 (99%) | 0.0 |
| | kininogen (HK) protein - Homo | 1 . . . 644 | 643/644 (99%) | |
| | sapiens, 644 aa. [WO200214369- | | | |
| | A2, 21 FEB. 2002] | | | |
| ABB78707 | Human high molecular weight | 19 . . . 644 | 625/626 (99%) | 0.0 |
| | kininogen (HK) mature protein | 1 . . . 626 | 625/626 (99%) | |
| | SEQ ID NO: 1 - Homo sapiens, 626 | | | |
| | aa. [WO200214369-A2, 21 FEB. | | | |
| | 2002] | | | |
| ABR41202 | Human DITHP extracellular | 288 . . . 644 | 355/357 (99%) | 0.0 |
| | signalling protein - Homo sapiens, | 1 . . . 357 | 355/357 (99%) | |
| | 357 aa. [WO200297031-A2, 05 | | | |
| | DEC. 2002] | | | |
| ABG21105 | Novel human diagnostic protein | 1 . . . 416 | 385/432 (89%) | 0.0 |
| | #21096 - Homo sapiens, 435 aa. | 2 . . . 433 | 389/432 (89%) | |
| | [WO200175067-A2, 11 OCT. | | | |
| | 2001] | | | |

[0310] In a BLAST search of public sequence databases, the NOV1a protein was found to have homology to the proteins shown in the BLASTP data in Table 1E.

TABLE 1E
Public BLASTP Results for NOV1a

| | | | Identities/ | |
|---|---|---|---|---|
| Protein | | | Similarities for | |
| Accession | | NOV1a Residues/ | the Matched | Expect |
| Number | Protein/Organism/Length | Match Residues | Portion | Value |
| P01042 | Kininogen precursor (Alpha-2- | 1 . . . 644 | 643/644 (99%) | 0.0 |
| | thiol proteinase inhibitor) | 1 . . . 644 | 643/644 (99%) | |
| | [Contains: Bradykinin] - Homo | | | |
| | sapiens (Human), 644 aa. | | | |
| P01044 | Kininogen, HMW I precursor | 1 . . . 643 | 454/644 (70%) | 0.0 |
| | (Thiol proteinase inhibitor) | 1 . . . 620 | 517/644 (79%) | |
| | [Contains: Bradykinin] - Bos | | | |
| | taurus (Bovine), 621 aa. | | | |
| P01045 | Kininogen, HMW II precursor | 1 . . . 643 | 450/644 (69%) | 0.0 |
| | (Thiol proteinase inhibitor) | 1 . . . 618 | 515/644 (79%) | |
| | [Contains: Bradykinin] - Bos | | | |
| | taurus (Bovine), 619 aa. | | | |
| AAO61092 | Kininogen - Homo sapiens | 1 . . . 416 | 406/425 (95%) | 0.0 |
| | (Human), 427 aa. | 1 . . . 425 | 407/425 (95%) | |
| O08677 | Kininogen precursor [Contains: | 1 . . . 644 | 386/668 (57%) | 0.0 |
| | Bradykinin] - Mus musculus | 1 . . . 661 | 461/668 (68%) | |
| | (Mouse), 661 aa. | | | |

[0311] PFam analysis predicts that the NOV1a protein contains the domains shown in the Table 1F.

TABLE 1F
Domain Analysis of NOV1a

| | | Identities/ | |
|---|---|---|---|
| | | Similarities | |
| | NOV1a Match | for the | Expect |
| Pfam Domain | Region | Matched Region | Value |
| Cathelicidins | 30 . . . 95 | 16/70 (23%) | 0.57 |
| | | 34/70 (49%) | |
| cystatin | 23 . . . 126 | 30/112 (27%) | 1.2e−30 |
| | | 91/112 (81%) | |
| cystatin | 144 . . . 248 | 28/113 (25%) | 2.2e−34 |
| | | 93/113 (82%) | |
| cystatin | 266 . . . 370 | 32/113 (28%) | 2.7e−38 |
| | | 94/113 (83%) | |

### Example 2

[0312] The NOV2 clone was analyzed, and the nucleotide and encoded polypeptide sequences are shown in Table 2A.

TABLE 2A
NOV2 Sequence Analysis

| | | |
|---|---|---|
| NOV2a, CG120844-02 | SEQ ID NO: 77 | 689 bp |
| DNA Sequence | ORF Start: at 2 | ORF Stop: TAA at 659 |

CTCCTTCCAGGACCTGGACCTCTGCCCTCTGGATGGCGGCATCCAGCTACGAATCTCCGACCACCACT
ACAGCAAGGGGTTCAGGCAGGCCGCGTCAGTTGTTGTGGCCATGGACAAGCTGAGGAAGATGCTGGTT
CCCTGCCCACAGACCTTCCAGGAGAATGACCTGAGCACCTTCTTTCCCTTCATCTTTGAAGAAGAACC
TATCTTCTTCGACACATGGGATAACGAGGCTTATGTGCACGATGCACCTGTACGATCACTGAACTGCA
CGCTCCGGGACTCACAGCAAAAAAGCTTGGTGATGTCTGGTCCATATGAACTGAAAGCTCTCCACCTC
CAAGGAGAAGAAAGTAATGACAAAATACCTGTGGCCTTGGGCCTCAAGGAAAAGAATCTGTACCTGTC
CTGCGTGTTGAAAGATGATAAGCCCACTCTACAGCTGGAGAGTGTAGATCCCAAAAATTACCCAAAGA
AGAAGATGGAAAAGCGATTTGTCTTCAACAAGATAGAAATCAATAACAAGCTGGAATTTGAGTCTGCC
CAGTTCCCCAACTGGTACATCAGCACCTCTCAAGCAGAAAACATGCCCGTCTTCCTGGGAGGGACCAA
AGGCGGCCAGGATATAACTGACTTCACCATGCAATTTGTGTCTTCCTAAAGAGAGCTGTACCCAGAGA
GTCCTGTGC

| | | | |
|---|---|---|---|
| NOV2a, CG120844-02 | | | |
| Protein Sequence | SEQ ID NO: 78 | 219 aa | MW at 25075.3 kD |

SFQDLDLCPLDGGIQLRISDHHYSKGFRQAASVVVAMDKLRKMLVPCPQTFQENDLSTFFPFIFEEEP
IFFDTWDNEAYVHDAPVRSLNCTLRDSQQKSLVMSGPYELKALHLQGEESNDKIPVALGLKEKNLYLS
CVLKDDKPTLQLESVDPKNYPKKKMEKRFVFNKIEINNKLEFESAQFPNWYISTSQAENMPVFLGGTK
GGQDITDFTMQFVSS

| | | |
|---|---|---|
| NOV2b, 251426189 | SEQ ID NO: 79 | 400 bp |
| DNA Sequence | ORF Start: at 2 | ORF Stop: end of sequence |

CACCGGATCCCTCCGGGACTCACAGCAAAAAAGCTTGGTGATGTCTGGTCCATATGAACTGAAAGCTC
TCCACCTCCAAGGAGAAGAAAGTAATGACAAAATACCTGTGGCCTTGGGCCTCAAGGAAAAGAATCTG
TACCTGTCCTGCGTGTTGAAAGATGATAAGCCCACTCTACAGCTGGAGAGTGTAGATCCCAAAAATTA
CCCAAAGAAGAAGATGGAAAAGCGATTTGTCTTCAACAAGATAGAAATCAATAACAAGCTGGAATTTG
AGTCTGCCCAGTTCCCCAACTGGTACATCAGCACCTCTCAAGCAGAAAACATGCCCGTCTTCCTCGGA
GGGACCAAAGGCGGCCAGGATATAACTGACTTCACCATGGAATTTGTGTCTCTCGAGGGC

| | | | |
|---|---|---|---|
| NOV2b, 251426189 | | | |
| Protein Sequence | SEQ ID NO: 80 | 133 aa | MW at 15050.1 kD |

TGSLRDSQQKSLVMSGPYELKALHLQGEESNDKTPVALGLKEKNLYLSCVLKDDKPTLQLESVDPKNY
PKKKMEKRFVFNKIEINNKLEFESAQFPNWYISTSQAENMPVFLGGTKGCQDITDFTMQFVSLEG

| | | |
|---|---|---|
| NOV2c, CG120844-01 | SEQ ID NO: 81 | 820 bp |
| DNA Sequence | ORF Start: ATG at 3 | ORF Stop: TAA at 810 |

CCATGGCAGAAGTACCTGAGCTCGCCAGTGAAATGATGGCTTATTACAGTGGCAATGAGGATGACTTG
TTCTTTGAAGCTGATGGCCCTAAACAGATGAAGTGCTCCTTCCAGGACCTGGACCTCTGCCCTCTCCA
TGGCGGCATCCAGCTACGAATCTCCGACCACCACTACAGCAAGGGCTTCAGGCAGGCCGCGTCAGTTG
TTGTGGCCATGGACAAGCTGAGGAAGATGCTGGTTCCCTGCCCACAGACCTTCCAGGAGAATGACCTG
AGCACCTTCTTTCCCTTCATCTTTGAAGAAGAACCTATCTTCTTCGACACATGGGATAACGAGGCTTA
TGTGCACGATGCACCTCTACGATCACTGAACTGCACGCTCCGGGACTCACAGCAAAAAAGCTTGGTGA
TGTCTGGTCCATATGAACTGAAAGCTCTCCACCTCCAGGGACAGGATATGGAGCAACAAGTGGTGTTC
TCCATGTCCTTTGTACAAGGAGAAGAAAGTAATGACAAAATACCTGTGGCCTTGGGCCTCAAGGAAAA
GAATCTGTACCTGTCCTGCGTGTTGAAAGATGATAAGCCCACTCTACAGCTGGAGAGTGTAGATCCCA
AAAATTACCCAAAGAAGAAGATGGAAAAGCGATTTGTCTTCAACAAGATAGAAATCAATAACAAGCTG
GAATTTGAGTCTGCCCAGTTCCCCAACTGGTACATCAGCACCTCTCAAGCAGAAAACATGCCCGTCTT
CCTGGGAGGGACCAAAGGCGGCCAGGATATAACTGACTTCACCATGCAATTTGTGTCTTCTTAAAGAG
AGCT

| | | | |
|---|---|---|---|
| NOV2c, CG120844-01 | | | |
| Protein Sequence | SEQ ID NO: 82 | 269 aa | MW at 30747.6 kD |

MAEVPELASEMMAYYSGNEDDLFFEADGPKOMKCSFODLDLCPLDGGIOLRISDHHYSKGFROAASVV
VAMDKLRKMLVPCPQTFQENDLSTFFPFIFEEEPIFFDTWDNEAYVHDAPVRSLNCTLRDSQQKSLVM
SGPYELKALHLQGQDMEQQVVFSMSFVQGEESNDKIPVALGLKEKNLYLSCVLKDDKPTLQLESVDPK
NYPKKKMEKRFVFNKIEINNKLEFESAQFPNWYISTSQAENNPVFLGGTKGGQDITDFTMQFVSS

| | | |
|---|---|---|
| | SEQ ID NO: 83 | 689 bp |
| NOV2d, SNP13377796 of | ORF Start: at 2 | ORF Stop: TAA at 659 |
| CG120844-02, DNA Sequence | SNP Pos: 231 | SNP Change: A to G |

CTCCTTCCAGGACCTGGACCTCTGCCCTCTGGATGGCGGCATCCACCTACGAATCTCCCACCACCACT
ACAGCAAGGGCTTCAGGCAGGCCGCGTCAGTTGTTGTCGCCATGGACAAGCTGAGGAAGATGCTGGTT
CCCTGCCCACAGACCTTCCAGGAGAATGACCTGAGCACCTTCTTTCCCTTCATCTTTGAAGAAGAACC
TATCTTCTTCGACACATGGGATAACGGGGCTTATGTCCACGATGCACCTGTACGATCACTGAACTGCA
CGCTCCGGGACTCACAGCAAAAAAGCTTGGTGATGTCTGGTCCATATGAACTGAAAGCTCTCCACCTC
CAAGGAGAAGAAAGTAATGACAAAATACCTGTCGCCTTGGGCCTCAAGGAAAAGAATCTGTACCTGTC
CTGCGTGTTGAAAGATGATAAGCCCACTCTACAGCTGGAGAGTGTAGATCCCAAAAATTACCCAAAGA
AGAAGATGGAAAAGCGATTTGTCTTCAACAAGATAGAAATCAATAACAACCTGGAATTTGAGTCTGGC
CAGTTCCCCAACTGGTACATCAGCACCTCTCAAGCAGAAAACATGCCCGTCTTCCTGGCAGGGACCAA
AGGCGGCCAGGATATAACTGACTTCACCATGCAATTTGTGTCTTCCTAAAGAGAGCTGTACCCAGAGA
GTCCTGTGC

| | | | |
|---|---|---|---|
| NOV2d, SNP13377796 of | SEQ ID NO: 84 | | MW at 25003.2 kD |
| CG120844-02, Protein Sequence | SNP Pos: 77 | 219 aa | SNP Change: Glu to Gly |

SFQDLDLCPLDGGIQLRISDHHYSKGFRQAASVVVAMDKLRKNLVPCPQTFQENDLSTFFPFIFEEEP
IFFDTWDNGAYVHDAPVRSLNCTLRDSQQKSLVMSGPYELKALHLQGEESNDKTPVALGLKEKNLYLS
CVLKDDKPTLQLESVDPKNYPKKKMEKRFVFNKIEINNKLEFESAQFPNWYISTSQAENMPVFLGGTK
GGQDITDFTMQFVSS

| | | |
|---|---|---|
| | SEQ ID NO: 85 | 689 bp |
| NOV2e, SNP13377795 of | ORF Start: at 2 | ORF Stop: TAA at 659 |
| CG120844-02, DNA Sequence | SNP Pos: 272 | SNP Change: A to G |

CTCCTTCCAGGACCTGGACCTCTGCCCTCTGGATGGCGGCATCCAGCTACGAATCTCCGACCACCACT
ACAGCAAGGGCTTCAGGCAGGCCGCGTCAGTTGTTGTGGCCATGGACAAGCTGAGCAAGATGCTGGTT
CCCTGCCCACACACCTTCCAGGAGAATGACCTGAGCACCTTCTTTCCCTTCATCTTTGAAGAAGAACC
TATCTTCTTCGACACATGGGATAACGAGGCTTATGTGCACGATGCACCTGTACGATCACTGAACTGCG
CGCTCCGGGACTCACAGCAAAAAAGCTTGGTGATGTCTGGTCCATATGAACTGAAAGCTCTCCACCTC
CAAGGAGAAGAAAGTAATGACAAAATACCTGTGGCCTTGGGCCTCAAGGAAAAGAATCTGTACCTGTC
CTGCGTGTTGAAAGATGATAAGCCCACTCTACAGCTGGAGAGTGTAGATCCCAAAAATTACCCAAAGA
AGAAGATGGAAAAGCGATTTGTCTTCAACAAGATAGAAATCAATAACAAGCTGGAATTTGAGTCTGCC
CAGTTCCCCAACTGGTACATCAGCACCTCTCAAGCAGAAAACATGCCCGTCTTCCTGGGAGGGACCAA
AGGCGGCCAGGATATAACTGACTTCACCATGCAATTTGTGTCTTCCTAAAGAGAGCTGTACCCAGAGA
GTCCTGTGC

| | | | |
|---|---|---|---|
| NOV2e, SNP13377795 of | SEQ ID NO: 86 | | MW at 25045.2 kD |
| CG120844-02, Protein Sequence | SNP Pos: 91 | 219 aa | SNP Change: Thr to Ala |

SFQDLDLCPLDGGIQLRISDHHYSKGFRQAASVVVAMDKLRKMLVPCPQTFQENDLSTFFPFIFEEEP
IFFDTWDNEAYVHDAPVRSLNCALRDSQQKSLVMSGPYELKALHLQGEESNDKIPVALGLKEKNLYLS
CVLKDDKPTLQLESVDPKNYPKKKMEKRFVFNKIEINNKLEFESAQFPNWYISTSQAENMPVFLGGTK
GGQDITDFTMQFVSS

| | | |
|---|---|---|
| | SEQ ID NO: 87 | 689 bp |
| NOV2f, SNP13377794 of | ORF Start: at 2 | ORF Stop: TAA at 659 |
| CG120844-02, DNA Sequence | SNP Pos: 374 | SNP Change: G to A |

CTCCTTCCAGGACCTGGACCTCTGCCCTCTCGATGGCGGCATCCAGCTACGAATCTCCGACCACCACT
ACAGCAAGGGCTTCAGGCAGGCCGCGTCAGTTGTTGTGGCCATGGACAAGCTGAGGAAGATGCTGGTT
CCCTGCCCACAGACCTTCCAGGAGAATGACCTGAGCACCTTCTTTCCCTTCATCTTTGAAGAACAACC
TATCTTCTTCGACACATGGGATAACGAGGCTTATGTGCACGATGCACCTGTACGATCACTGAACTGCA
CGCTCCGGGACTCACAGCAAAAAAGCTTGGTGATGTCTGGTCCATATGAACTGAAAGCTCTCCACCTC
CAAGCAGAAGAAAGTAATGACAAAATACCTGTGACCTTGGGCCTCAAGGAAAAGAATCTGTACCTGTC
CTGCGTGTTGAAAGATGATAAGCCCACTCTACAGCTGGAGAGTGTAGATCCCAAAAATTACCCAAAGA
AGAAGATGGAAAAGCGATTTGTCTTCAACAAGATAGAAATCAATAACAAGCTGGAATTTGAGTCTGCC
CAGTTCCCCAACTGGTACATCAGCACCTCTCAAGCAGAAAACATGCCCGTCTTCCTGGGAGGGACCAA
AGGCGGCCAGGATATAACTGACTTCACCATGCAATTTGTGTCTTCCTAAAGAGAGCTGTACCCAGAGA
GTCCTCTGC

| | | | |
|---|---|---|---|
| NOV2f, SNP13377794 of | SEQ ID NO: 88 | | MW at 25105.3 kD |
| CG120844-02, Protein Sequence | SNP Pos: 125 | 219 aa | SNP Change: Ala to Thr |

SFQDLDLCPLDGGIQLRISDHHYSKGFRQAASVVVAMDKLRKMLVPCPQTFQENDLSTFFPFIFEEEP
IFFDTWDNEAYVHDAPVRSLNCTLRDSQQKSLVMSGPYELKALHLQGEESNDKIPVTLGLKEKNLYLS
CVLKDDKPTLQLESVDPKNYPKKKMEKRFVFNKIEINNKLEFESAQFPNWYISTSQAENMPVFLGGTK
GGQDITDFTMQFVSS

| | | |
|---|---|---|
| | SEQ ID NO: 89 | 689 bp |
| NOV2g, SNP13377793 of | ORF Start: at 2 | ORF Stop: TAA at 659 |
| CG120844-02, DNA Sequence | SNP Pos: 522 | SNP Change: A to G |

CTCCTTCCAGGACCTGGACCTCTGCCCTCTGGATGGCGGCATCCAGCTACGAATCTCCGACCACCACT
ACAGCAAGGGCTTCAGGCAGGCCGCGTCAGTTGTTGTGGCCATGGACAAGCTGAGGAAGATGCTGGTT
CCCTGCCCACAGACCTTCCAGGAGAATGACCTGAGCACCTTCTTTCCCTTCATCTTTGAAGAAGAACC
TATCTTCTTCGACACATGGGATAACGAGGCTTATGTGCACGATGCACCTGTACCATCACTGAACTGCA
CGCTCCGGGACTCACAGCAAAAAAGCTTGGTGATGTCTGGTCCATATGAACTGAAAGCTCTCCACCTC
CAACGAGAAGAAAGTAATGACAAAATACCTGTGGCCTTGGGCCTCAAGGAAAACAATCTGTACCTGTC
CTGCGTGTTGAAAGATGATAAGCCCACTCTACAGCTGGAGAGTGTAGATCCCAAAAATTACCCAAAGA
AGAAGATGGAAAAGCGATTTGTCTTCAACAAGATAGAAATCAATAGCAAGCTGGAATTTGAGTCTGCC
CAGTTCCCCAACTGGTACATCAGCACCTCTCAAGCAGAAAACATGCGCGTCTTCCTGGGAGGGACCAA
AGGCGGCCAGGATATAACTGACTTCACCATGCAATTTGTGTCTTCCTAAAGAGAGCTGTACCCAGAGA
GTCCTGTGC

| | | | |
|---|---|---|---|
| NOV2g, SNP13377793 of | SEQ ID NO: 90 | | MW at 25048.3 kD |
| CG120844-02, Protein Sequence | SNP Pos: 174 | 219 aa | SNP Change: Asn to Ser |

SFQDLDLCPLDGGIQLRISDHHYSKGFRQAASVVVAMDKLRKMLVPCPQTFQENDLSTFFPFIFEEEP
IFFDTWDNEAYVHDAPVRSLNCTLRDSQQKSLVMSGPYELKALHLQGEESNDKIPVALGLKEKNLYLS
CVLKDDKPTLQLESVDPKNYPKKKMEKRFVFNKIEINSKLEFESAQFPNWYISTSQAENMPVFLGGTK
GGQDITDFTMQFVSS

| | | |
|---|---|---|
| | SEQ ID NO: 91 | 689 bp |
| NOV2h, SNP13377781 of | ORF Start: at 2 | ORF Stop: TAA at 659 |
| CG120844-02, DNA Sequence | Pos: 566 | SNP Change: A to G |

CTCCTTCCAGGACCTGCACCTCTGCCCTCTGGATGGCGGCATCCAGCTACGAATCTCCGACCACCACT
ACAGCAAGGGCTTCAGGCAGGCCGCGTCAGTTGTTGTGGCCATGGACAAGCTGAGGAAGATGCTGGTT
CCCTGCCCACAGACCTTCCAGGAGAATGACCTGAGCACCTTCTTTCCCTTCATCTTTGAAGAAGAACC
TATCTTCTTCGACACATGGGATAACGAGGCTTATGTGCACGATGCACCTGTACGATCACTGAACTGCA
CGCTCCGGGACTCACAGCAAAAAAGCTTGGTGATGTCTCGTCCATATGAACTGAAAGCTCTCCACCTC
CAAGGAGAAGAAAGTAATGACAAAATACCTGTGGCCTTGGGCCTCAAGGAAAAGAATCTGTACCTGTC
CTGCGTGTTGAAAGATGATAACCCCACTCTACAGCTGGAGAGTGTAGATCCCAAAAATTACCCAAAGA
ACAAGATGGAAAAGCGATTTGTCTTCAACAAGATAGAAATCAATAACAAGCTGGAATTTGAGTCTGCC
CAGTTCCCCAACTGGTACATCGGCACCTCTCAAGCAGAAAACATGCCCGTCTTCCTGGGAGGGACCAA
AGGCGGCCAGGATATAACTGACTTCACCATGCAATTTGTGTCTTCCTAAAGAGAGCTGTACCCAGAGA
GTCCTGTCC

| | | | |
|---|---|---|---|
| NOV2h, SNP13377781 of | SEQ ID NO: 92 | | MW at 25045.3 kD |
| CG120844-02, Protein Sequence | SNP Pos: 189 | 219 aa | SNP Change: Ser to Gly |

SFQDLDLCPLDGGIQLRISDHHYSKGFRQAASVVVAMDKLRKMLVPCPQTFQENDLSTFFPFIFEEEP
IFFDTWDNEAYVHDAPVRSLNCTLRDSQQKSLVMSGPYELKALHLQGEESNDKIPVALCLKEKNLYLS
CVLKDDKPTLQLESVDPKNYPKKKMEKRFVFNKIEINNKLEFESAQFPNWYIGTSQAENMPVFLGGTK
GGQDITDFTMQFVSS

| | | |
|---|---|---|
| | SEQ ID NO: 93 | 689 bp |
| NOV2i, SNP13377792 of | ORF Start: at 2 | ORF Stop: TAA at 659 |
| CG120844-02, DNA Sequence | SNP Pos: 608 | SNP Change: A to G |

CTCCTTCCAGGACCTGGACCTCTGCCCTCTGGATGGCGGCATCCAGCTACGAATCTCCGACCACCACT
ACAGCAAGGGCTTCAGGCAGGCCGCGTCAGTTGTTGTGGCCATGGACAAGCTGAGGAAGATGCTGGTT
CCCTGCCCACAGACCTTCCAGGAGAATGACCTGAGCACCTTCTTTCCCTTCATCTTTGAAGAAGAACC
TATCTTCTTCGACACATGGGATAACGAGGCTTATGTGCACGATGCACCTGTACGATCACTGAACTGCA
CGCTCCGGCACTCACAGCAAAAAAGCTTGGTGATGTCTGGTCCATATGAACTGAAAGCTCTCCACCTC
CAAGGAGAAGAAAGTAATGACAAAATACCTGTGGCCTTGGGCCTCAAGGAAAAGAATCTGTACCTGTC
CTGCGTGTTGAAAGATGATAAGCCCACTCTACAGCTGGAGAGTGTAGATCCCAAAAATTACCCAAAGA
AGAAGATGGAAAAGCGATTTGTCTTCAACAAGATAGAAATCAATAACAAGCTGGAATTTGAGTCTGCC
CAGTTCCCCAACTGGTACATCAGCACCTCTCAAGCAGAAAACATGCCCGTCTTCCTGGGAGGGGCCAA
AGGCGGCCAGGATATAACTGACTTCACCATGCAATTTGTGTCTTCCTAAAGAGAGCTGTACCCAGAGA
GTCCTGTGC

| | | | |
|---|---|---|---|
| NOV2i, SNP13377792 of | SEQ ID NO: 94 | | MW at 25045.2 kD |
| CG120844-02, Protein Sequence | SNP Pos: 203 | 219 aa | SNP Change: Thr to Ala |

SFQDLDLCPLDGGIQLRISDHHYSKGFRQAASVVVAMDKLRKMLVPCPQTFQENDLSTFFPFIFEEEP
IFFDTWDNEAYVHDAPVRSLNCTLRDSQQKSLVMSGPYELKALHLQGEESNDKIPVALGLKEKNLYLS
CVLKDDKPTLQLESVDPKNYPKKKMEKRFVFNKIEINNKLEFESAQFPNWYISTSQAENMPVFLGGAK
GGQDITDFTMQFVSS

[0313] A ClustalW comparison of the above protein sequences yields the following sequence alignment shown in Table 2B.

TABLE 2B
Comparison of the NOV2 protein sequences.

| | |
|---|---|
| NOV2a | ----------------------------------SFQDLDLCPLDGGIQLRISDHHYSKG |
| NOV2b | ------------------------------------------------------------ |
| NOV2c | MAEVPELASEMMAYYSGNEDDLFFEADGPKQMKCSFQDLDLCPLDGGIQLRISDHHYSKG |
| NOV2a | FRQAASVVVAMDKLRKMLVPCPQTFQENDLSTFFPFIFEEEPIFFDTWDNEAYVHDAPVR |
| NOV2b | ------------------------------------------------------------ |
| NOV2c | FRQAASVVVAMDKLRKMLVPCPQTFQENDLSTFFPFIFEEEPIFFDTWDNEAYVHDAPVR |
| NOV2a | SLNCTLRDSQQKSLVMSGPYELKALHLQG----------------EESNDKIPVALGLKE |
| NOV2b | --TGSLRDSQQKSLVMSGPYELKALHLQG----------------EESNDKIPVALGLKE |
| NOV2c | SLNCTLRDSQQKSLVMSGPYELKALHLQGQDMEQQVVFSMSFVQGEESNDKIPVALGLKE |
| NOV2a | KNLYLSCVLKDDKPTLQLESVDPKNYPKKKMEKRFVFNKIEINNKLEFESAQFPNWYIST |
| NOV2b | KNLYLSCVLKDDKPTLQLESVDPKNYPKKKMEKRFVFNKIEINNKLEFESAQFPNWYIST |
| NOV2c | KNLYLSCVLKDDKPTLQLESVDPKNYPKKKMEKRFVFNKIEINNKLEFESAQFPNWYIST |
| NOV2a | SQAENMPVFLGGTKGGQDITDFTMQFVSS-- |
| NOV2b | SQAENMPVFLGGTKGGQDITDFTMQFVSLEG |
| NOV2c | SQAENMPVFLGGTKGGQDITDFTMQFVSS-- |
| NOV2a | (SEQ ID NO: 78) |
| NOV2b | (SEQ ID NO: 80) |
| NOV2c | (SEQ ID NO: 82) |

[0314] Further analysis of the NOV2a protein yielded the following properties shown in Table 2C.

TABLE 2C
Protein Sequence Properties NOV2a

| SignalP analysis: | No Known Signal Sequence Predicted | | | |
|---|---|---|---|---|
| PSORT II | PSG: a new signal peptide prediction method | | | |
| analysis: | N-region: length 11; pos.chg 0; neg.chg 3 | | | |
| | H-region: length 5; peak value 0.00 | | | |
| | PSG score: −4.40 | | | |
| | GvH: von Heijne's method for signal seg. recognition | | | |
| | GvH score (threshold: −2.1): −6.91 | | | |
| | possible cleavage site: between 52 and 53 | | | |
| | >>> Seems to have no N-terminal signal peptide | | | |
| | ALOM: Klein et al's method for TM region allocation | | | |
| | Init position for calculation: 1 | | | |
| | Tentative number of TMS(s) for the threshold 0.5: 0 | | | |
| | number of TMS(s) . . . fixed | | | |
| | PERIPHERAL Likelihood = 5.73 (at 31) | | | |
| | ALOM score: 5.73 (number of TMSs: 0) | | | |
| | MITDISC: discrimination of mitochondrial targeting seq | | | |
| | R content: | 0 | Hyd Moment(75): | 2.74 |
| | Hyd Moment(95): | 5.40 | G content: | 0 |
| | D/E content: | 2 | S/T content: | 1 |

Score: −7.29
Gavel: prediction of cleavage sites for mitochondrial preseq
cleavage site motif not found
NUCDISC: discrimination of nuclear localization signals
pat4: PKKK (4) at 157
pat7: PKKKMEK (5) at 157
bipartite: none
content of basic residues: 11.0%
NLS Score: 0.21
KDEL: ER retention motif in the C-terminus: none
ER Membrane Retention Signals: none
SKL: peroxisomal targeting signal in the C-terminus: none
PTS2: 2nd peroxisomal targeting signal: none
VAC: possible vacuolar targeting motif: none
RNA-binding motif: none
Actinin-type actin-binding motif:
type 1: none
type 2: none
NMYR: N-myristoylation pattern: none
Prenylation motif: none
memYQRL: transport motif from cell surface to Golgi: none
Tyrosines in the tail: none
Dileucine motif in the tail: none
checking 63 PROSITE DNA binding motifs: none
checking 71 PROSITE ribosomal protein motifs: none
checking 33 PROSITE prokaryotic DNA binding motifs: none
NNCN: Reinhardt's method for Cytoplasmic/Nuclear discrimination
Prediction: cytoplasmic
Reliability: 70.6
COIL: Lupas's algorithm to detect coiled-coil regions
total: 0 residues
Final Results (k = 9/23):
43.5%: cytoplasmic
34.8%: nuclear
17.4%: mitochondrial
4.3%: Golgi
>> prediction for CG120844-02 is cyt (k = 23)

[0315] A search of the NOV2a protein against the Geneseq database, a proprietary database that contains sequences published in patents and patent publication, yielded several homologous proteins shown in Table 2D.

TABLE 2D
Geneseq Results for NOV2a

| | | | Identities/ | |
|---|---|---|---|---|
| | | | Similarities for | |
| Geneseq | Protein/Organism/Length | NOV2a Residues/ | the Matched | Expect |
| Identifier | [Patent #, Date] | Match Residues | Region | Value |
| ABU08119 | Recombinant interleukin 1 beta | 1 . . . 219 | 219/235 (93%) | e−124 |
| | protein - Homo sapiens, 269 aa. | 35 . . . 269 | 219/235 (93%) | |
| | [GB2375604-A, 20 NOV. 2002] | | | |
| AAE33564 | Human interleukin-1B (IL-1B) - | 1 . . . 219 | 219/235 (93%) | e−124 |
| | Homo sapiens, 269 aa. | 35 . . . 269 | 219/235 (93%) | |
| | [WO2002101015-A2, 19 DEC. | | | |
| | 2002] | | | |
| AAU11115 | Human Interleukin-1beta precursor | 1 . . . 219 | 219/235 (93%) | e−124 |
| | protein - Homo sapiens, 269 aa. | 35 . . . 269 | 219/235 (93%) | |
| | [US6306613-B1, 23 OCT. 2001] | | | |
| AAU80166 | Human interleukin 1 beta - Homo | 1 . . . 219 | 219/235 (93%) | e−124 |
| | sapiens, 269 aa. [WO200224951- | 35 . . . 269 | 219/235 (93%) | |
| | A1, 28 MAR. 2002] | | | |
| AAB35251 | Human pre-interleukin-1 beta - | 1 . . . 219 | 219/235 (93%) | e−124 |
| | Homo sapiens, 269 aa. | 35 . . . 269 | 219/235 (93%) | |
| | [US6187550-B1, 13 FEB. 2001] | | | |

[0316] In a BLAST search of public sequence databases, the NOV2a protein was found to have homology to the proteins shown in the BLASTP data in Table 2E.

TABLE 2E
Public BLASTP Results for NOV2a

| | | | Identities/ | |
|---|---|---|---|---|
| Protein | | | Similarities for | |
| Accession | | NOV2a Residues/ | the Matched | Expect |
| Number | Protein/Organism/Length | Match Residues | Portion | Value |
| AAP35877 | Interleukin 1, beta - Homo sapiens | 1 . . . 219 | 219/235 (93%) | e−123 |
| | (Human), 269 aa. | 35 . . . 269 | 219/235 (93%) | |
| AAP36922 | Homo sapiens interleukin 1, beta - | 1 . . . 219 | 219/235 (93%) | e−123 |
| | synthetic construct, 270 aa | 35 . . . 269 | 219/235 (93%) | |
| | (fragment). | | | |
| E975886 | PROTEIN SEQUENCE 6 FROM | 1 . . . 219 | 219/235 (93%) | e−123 |
| | PATENT NUMBER AU601173 - | 4 . . . 238 | 219/235 (93%) | |
| | unidentified, 238 aa. | | | |
| P01584 | Interleukin-1 beta precursor (IL-1 | 1 . . . 219 | 219/235 (93%) | e−123 |
| | beta) (Catabolin) - Homo sapiens | 35 . . . 269 | 219/235 (93%) | |
| | (Human), 269 aa. | | | |
| Q8MKH3 | Interleukin-1 beta - Saimiri | 1 . . . 219 | 198/235 (84%) | e−110 |
| | sciureus (Common squirrel | 35 . . . 269 | 207/235 (87%) | |
| | monkey), 269 aa. | | | |

[0317] PFam analysis predicts that the NOV2a protein contains the domains shown in the Table 2F.

TABLE 2F
Domain Analysis of NOV2a

| | | Identities/ | |
|---|---|---|---|
| | | Similarities | |
| | NOV2a Match | for the | Expect |
| Pfam Domain | Region | Matched Region | Value |
| IL1_propep | 1 . . . 69 | 42/111 (38%) | 5e−21 |
| | | 67/111 (60%) | |
| IL1 | 92 . . . 218 | 77/147 (52%) | 3.2e−69 |
| | | 123/147 (84%) | |

### Example 3

[0318] The NOV3 clone was analyzed, and the nucleotide and encoded polypeptide sequences are shown in Table 4A.

TABLE 3A
NOV3 Sequence Analysis

| | | |
|---|---|---|
| NOV3a, CG127616-01 | SEQ ID NO: 95 | 500 bp |
| DNA Sequence | ORF Start: ATG at 182 | ORF Stop: TGA at 494 |

CCCGGACCCGGACCGGGGCCACCGCGCCCGCTCTGCTCCGACACCGCGCCCCCTGGACAGCCGCCCTC
TCCTCCAGGCCCGTGGGGCTGGCCCTGCACCGCCGAGCTTCCCGGGATGAGGGCCCCCGGTGTGGTCA
CCCGGCGCGCCCCAGGTCGCTGAGGGACCCCGGCCAGGCGCGGAGATGGGGGTGCACGAATGTCCTGC
CTGGCTGTGGCTTCTCCTGTCCCTGCTGTCGCTCCCTCTGGGCCTCCCAGTCCTGGGCGCCCCACCAC
GCCTCATCTGTGACAGCCGAGTCCTGGAGAGGTACCTCTTGGAGGCCAAGGAGGCCGAGAATATCACG
AAGGAAGCCATCTCCCCTCCAGATGCGGCCTCAGCTGCTCCACTCCGAACAATCACTGCTGACACTTT
CCGCAAACTCTTCCGAGTCTACTCCAATTTCCTCCGGGGAAAGCTGAAGCTGTACACAGGGGAGGCCT
GCAGGACAGGGGACAGATGACCAG

| | | | |
|---|---|---|---|
| NOV3a, CG127616-01 | | | |
| Protein Sequence | SEQ ID NO: 96 | 104 aa | MW at 11567.4 kD |

MGVHECPAWLWLLLSLLSLPLGLPVLGAPPRLICDSRVLERYLLEAKEAENITKEAISPPDAASAAPL
RTITADTFRKLFRVYSNFLRGKLKLYTGEACRTGDR

| | | |
|---|---|---|
| NOV3b, CG127616-02 | SEQ ID NO: 97 | 324 bp |
| DNA Sequence | ORF Start: at 3 | ORF Stop: TGA at 318 |

CCTGGCTATCTGTTCTAGAATGTCCTGCCTGGCTGTGGCTTCTGCTGTCCCTGCTGTCGCTCCCTCTG
GGCCTCCCAGTCCTGGGCGCCCCACCACGCCTCATCTGTGACAGCCGAGTCCTGGAGAGGTACCTCTT
GGAGGCCAAGGAGGCCGAGAATATCACGAAGGAAGCCATCTCCCCTCCACATGCGGCCTCAGCTGCTC
CACTCCGAACAATCACTGCTGACACTTTCCGCAAACTCTTCCCAGTCTACTCCAATTTCCTCCGGGGA
AAGCTGAAGCTGTACACACGGGAGGCCTGCAGGACAGGGGACAGATGACCAG

| | | | |
|---|---|---|---|
| NOV3b, CG127616-02 | | | |
| Protein Sequence | SEQ ID NO: 98 | 105 aa | MW at 11741.6 kD |

WLSVLECPAWLWLLLSLLSLPLGLPVLGAPPRLICDSRVLERYLLEAKEAENITKEAISPPDAASAAP
LRTITADTFRKLFRVYSNFLRGKLKLYTGEACRTGDR

| | | |
|---|---|---|
| NOV3c, 227803412 | SEQ ID NO: 99 | 336 bp |
| DNA Sequence | ORF Start: at 1 | ORF Stop: TGA at 325 |

CGCGGATCCACCATGGGGGTGCACGAATGTCCTGCCTGGCTGTGGCTTCTCCTGTCCCTGCTGTCGCT
CCCTCTGGGCCTCCCAGTCCTGGGCGCCCCACCACGCCTCATCTGTGACACCCGAGTCCTGGAGAGGT
ACCTCTTGGAGGCCAAGGAGGCCGAGAATATCACGAAGGAAGCCATCTCCCCTCCAGATGCGGCCTCA
GCTGCTCCACTCCGAACAATCACTGCTGACACTTTCCGCAAACTCTTCCCAGTCTACTCCAATTTCCT
CCGGGGAAAGCTGAAGCTGTACACAGGGGAGGCCTGCAGGACAGGGGACAGATGACTCGAGCGG

| | | | |
|---|---|---|---|
| NOV3c, 227803412 | | | |
| Protein Sequence | SEQ ID NO: 100 | 108 aa | MW at 11968.8 kD |

RGSTMGVHECPAWLWLLLSLLSLPLGLPVLGAPPRLICDSRVLERYLLEAKEAENITKEAISPPDAAS
AAPLRTITADTFRKLFRVYSNFLRGKLKLYTGEACRTGDR

| | | |
|---|---|---|
| NOV3d, CG127616-03 | SEQ ID NO: 101 | 591 bp |
| DNA Sequence | ORF Start: at 3 | ORF Stop: TGA at 585 |

CCTGGCTATCTGTTCTAGAATGTCCTGCCTGGCTGTGGCTTCTCCTGTCCCTGCTGTCGCTCCCTCTG
GGCCTCCCAGTCCTGGGCGCCCCACCACGCCTCATCTGTGACAGCCGAGTCCTGGAGAGGTACCTCTT
GGAGGCCAAGGAGGCCGAGAATATCACCACGGGCTGTGCTGAACACTGCAGCTTGAATGAGAATATCA
CTGTCCCAGACACCAAAGTTAATTTCTATGCCTGGAAGAGGATGGAGGTCGGGCACCAGGCCGTAGAA
GTCTGGCAGGGCCTGGCCCTGCTGTCGGAAGCTGTCCTGCGGGGCCAGGCCCTGTTGATCAACTCTTC
CCAGCCGTGGGAGCCCCTGCAGCTGCATGTGGATAAAGCCGTCAGTGGCCTTCGCAGCCTCACCACTC
TGCTTCGGGCTCTGGGAGCCCAGAAGGAAGCCATCTCCCCTCCAGATGCGGCCTCAGCTGCTCCACTC
CGAACAATCACTGCTGACACTTTCCGCAAACTCTTCCGAGTCTACTCCAATTTCCTCCGGGGAAAGCT
GAAGCTGTACACAGGGGAGGCCTGCAGGACAGGGGACAGATGACCAG

| | | | |
|---|---|---|---|
| NOV3d, CG127616-03 | | | |
| Protein Sequence | SEQ ID NO: 102 | 194 aa | MW at 21494.7 kD |

WLSVLECPAWLWLLLSLLSLPLGLPVLGAPPRLICDSRVLERYLLEAKEAENITTGCAEHCSLNENIT
VPDTKVNFYAWKRMEVGQQAVEVWQGLALLSEAVLRGQALLINSSQPWEPLQLHVDKAVSGLRSLTTL
LRALGAQKEAISPPDAASAAPLRTITADTFRKLFRVYSNFLRGKLKLYTGEACRTGDR

| | | |
|---|---|---|
| NOV3e, CG127616-04 | SEQ ID NO: 103 | 282 bp |
| DNA Sequence | ORF Start: at 7 | ORF Stop: at 277 |

GGATCCTGGCTTCTCCTGTCCCTGCTGTCGCTCCCTCTGGCCCTCCCAGTCCTGGGCGCCCCACCACG
CCTCATCTGTGACAGCCGAGTCCTGGACAGGTACCTCTTGGAGGCCAAGCAGGCCGAGAATATCACGA
AGGAAGCCATCTCCCCTCCAGATGCGGCCTCAGCTGCTCCACTCCGAACAATCACTGCTGACACTTTC
CGCAAACTCTTCCGAGTCTACTCCAATTTCCTCCGGGGAAAGCTGAAGCTGTACACAGGGGAGGCCTG
CAGGCTCGAG

| | | | |
|---|---|---|---|
| NOV3e, CG127616-04 | | | |
| Protein Sequence | SEQ ID NO: 104 | 90 aa | MW at 10013.6 kD |

WLLLSLLSLPLGLPVLGAPPRLICDSRVLERYLLEAKEAENITKEAISPPDAASAAPLRTITADTFRK
LFRVYSNFLRGKLKLYTGEACR

| | | |
|---|---|---|
| NOV3f,CG127616-05 | SEQ ID NO: 105 | 1012 bp |
| DNA Sequence | ORF Start: ATG at 476 | ORF Stop: TGA at 815 |

CTCGCTGTGGCTTCTCCTGTCCCTGCTGTCGCTCCCTCTGGGCCTCCCAGTCCTGGGCGCCCCACCAC
GCCTCATCTGTGACAGCCGAGTCCTGGAGAGGTACCTCTTGGAGGCCAAGGAGGCCGAGAATATCACG
GTGAGACCCCTTCCCCACCACATTCCACAGAACTCACGCTCAGGGCTTCAGGGAACTCCTCCCAGATC
CAGGAACCTGGCACTTGGTTTGGGGTGGAGTTGGGAAGCTAGACACTGCCCCCCTACATAAGAATAAG
TCTGGTGGCCCCAAACCATACCTGGAAACTAGGCAAGGAGCAAAGCCAGCAGATCCTACAGCCTGTGG
GCCAGGGCCAGAGCCTTCAGGGACCCTTGAGTCCCCGGGCTGTGTGCATTTCAGACGGGCTGTGCTGA
ACACTGCAGCTTGAATGAGAATATCACTGTCCCAGACACCAAAGTTAATTTCTATGCCTGGAAGAGGA
TGGAGGTCGGGCAGCAGGCCGTAGAAGTCTGGCAGGGCCTGGCCCTGCTGTCGGAAGCTGTCCTGCGG
GGCCAGGCCCTGTTGGTCAACTCTTCCCAGCCGTGGGAGCCCCTGCAGCTGCATGTGGATAAAGCCGT
CAGTGGCCTTCGCAGCCTCACCACTCTGCTTCGGGCTCTGGGAGCCCAGAAGGAAGCCATCTCCCCTC
CAGATGCGGCCTCAGCTGCTCCACTCCCAACAATCACTGCTGACACTTTCCGCAAACTCTTCCGAGTC
TACTCCAATTTCCTCCGGGGAAAGCTCAAGCTGTACACAGGGGAGGCCTGCAGGACAGGGGACAGATG
ACCAGGTGTGTCCACCTGGGCATATCCACCACTTCCCTCACCAACATTGCTTGTGCCACACCCTCCCC
CGCCACTCCTGAACCCCTTGACTCCCGGGTGGTGGGAACCATGAATACAGGATGGGGGCTGCCTCTTG
CTCTCTTGGGGTCCAAGTTTTGTCTATTCTTCAACCTCATTGTCATGAATTCAAACCACC

| | | | |
|---|---|---|---|
| NOV3f, CG127616-05 | | | |
| Protein Sequence | SEQ ID NO: 106 | 113 aa | MW at 12334.1 kD |

[sequence omitted]

| | | |
|---|---|---|
| NOV3g, CG127616-06 | SEQ ID NO: 107 | 1012 bp |
| DNA Sequence | ORF Start: ATG at 476 | ORF Stop: TGA at 815 |

CTGGCTGTGGCTTCTCCTGTCCCTGCTGTCCCTCCCTCTGGGCCTCCCAGTCCTGGGCGCCCCACCAC
GCCTCATCTGTGACAGCCGAGTCCTGGAGAGGTACCTCTTGGAGGCCAAGGAGGCCGAGAATATCACG
GTGAGACCCCTTCCCCAGCACATTCCACAGAACTCACGCTCAGGGCTTCAGGGAACTCCTCCCAGATC
CAGGAACCTGGCACTTGGTTTGGGGTGCAGTTGGGAAGCTAGACACTGCCCCCCTACATAAGAATAAG
TCTGGTGGCCCCAAACCATACCTGGAAACTAGGCAAGGAGCAAAGCCAGCAGATCCTACAGCCTGTGG
GCCAGGGCCAGAGCCTTCAGGGACCCTTGACTCCCCGGGCTGTGTGCATTTCAGACGGGCTGTGCTCA
ACACTGCAGCTTGAATGAGAATATCACTGTCCCAGACACCAAAGTTAATTTCTATGCCTGGAAGAGGA
TGGAGGTCGGGCAGCAGGCCGTAGAAGTCTGGCAGGGCCTGGCCCTGCTGTCGGAAGCTGTCCTGCGG
GGCCAGGCCCTGTTGGTCAACTCTTCCCAGCCGTGGGAGCCCCTGCAGCTGCATGTGGATAAAGCCGT
CAGTGGCCTTCGCAGCCTCACCACTCTGCTTCGGGCTCTGGGAGCCCAGAAGGAAGCCATCTCCCCTC
CAGATGCGGCCTCAGCTGCTCCACTCCGAACAATCACTGCTGACACTTTCCGCAAACTCTTCCGAGTC
TACTCCAATTTCCTCCGGGGAAAGCTGAAGCTGTACACAGGGGAGGCCTGCAGGACAGGGGACAGATG
ACCAGGTGTGTCCACCTGGGCATATCCACCACTTCCCTCACCAACATTGCTTGTGCCACACCCTCCCC
CGCCAGTCCTGAACCCCTTGACTCCGGGGTGGTGGGAACCATGAATACAGGATGGGGGCTGCCTCTTG
CTCTCTTGGGGTCCAAGTTTTGTGTATTCTTCAACCTCATTCTCATGAATTGAAACCACC

| | | | |
|---|---|---|---|
| NOV3g, CG127616-06 | | | |
| Protein Sequence | SEQ ID NO: 108 | 113 aa | MW at 12334.1 kD |

[sequence omitted]

| | | |
|---|---|---|
| NOV3h, CG127616-07 | SEQ ID NO: 109 | 1012 bp |
| DNA Sequence | ORF Start: ATG at 476 | ORF Stop: TGA at 815 |

CTGGCTGTGGCTTCTCCTGTCCCTGCTGTCCCTCCCTCTGGGCCTCCCAGTCCTGGGCGCCCCACCAC
GCCTCATCTGTGACAGCCGAGTCCTGGACAGGTACCTCTTGGAGGCCAAGGAGGCCCAGAATATCACG
GTGAGACCCCTTCCCCAGCACATTCCACAGAACTCACGCTCAGGGCTTCACGGAACTCCTCCCAGATC
CAGGAACCTGGCACTTGGTTTGGGGTGGAGTTGGGAAGCTAGACACTGCCCCCCTACATAACAATAAG
TCTGGTGCCCCCAAACCATACCTGGAAACTAGGCAAGGAGCAAAGCCAGCAGATCCTACAGCCTGTGG
GCCACGGCCAGAGCCTTCAGCGACCCTTGACTCCCCGGGCTGTGTGCATTTCAGACGGGCTGTGCTGA
ACACTGCAGCTTGAATGAGAATATCACTGTCCCAGACACCAAAGTTAATTTCTATGCCTGGAAGAGGA
TGGAGGTCGGGCAGCAGGCCGTAGAAGTCTGGCAGGGCCTGCCCCTGCTGTCGGAAGCTGTCCTGCGG
GGCCAGGCCCTGTTGGTCAACTCTTCCCAGCCGTGGGAGCCCCTGCAGCTGCATGTGGATAAAGCCGT
CAGTGGCCTTCGCAGCCTCACCACTCTGCTTCGGGCTCTGGGAGCCCAGAAGGAAGCCATCTCCCCTC
CAGATGCGGCCTCAGCTGCTCCACTCCGAACAATCACTGCTGACACTTTCCGCAAACTCTTCCGAGTC
TACTCCAATTTCCTCCGGGGAAAGCTGAAGCTGTACACAGCGGAGGCCTGCAGGACAGGCGACAGATG
ACCAGGTCTGTCCACCTGGGCATATCCACCACTTCCCTCACCAACATTGCTTGTGCCACACCCTCCCC
CGCCACTCCTGAACCCCTTGACTCCGGGGTGGTGGGAACCATGAATACAGGATGGGGGCTGCCTCTTG
CTCTCTTGGGGTCCAAGTTTTGTGTATTCTTCAACCTCATTGTCATGAATTCAAACCACC

| | | | |
|---|---|---|---|
| NOV3h, CG127616-07 | | | |
| Protein Sequence | SEQ ID NO: 110 | 113 aa | MW at 12334.1 kD |

[sequence omitted]

| | | |
|---|---|---|
| NOV3i,CG127616-08 | SEQ ID NO: 111 | 333 bp |
| DNA Sequence | ORF Start: ATG at 10 | ORF Stop: TGA at 322 |

CGCGGATCCATGGGGGTGCACGAATGTCCTGCCTGGCTGTGGCTTCTCCTGTCCCTGCTGTCGCTCCC
TCTGGGCCTCCCAGTCCTGGGCGCCCCACCACGCCTCATCTGTGACAGCCGAGTCCTGGAGAGGTACC
TCTTGGAGGCCAAGGAGGCCGAGAATATCACGAAGGAAGCCATCTCCCCTCCAGATGCGGCCTCAGCT
GCTCCACTCCGAACAATCACTGCTGACACTTTCCGCAAACTCTTCCGAGTCTACTCCAATTTCCTCCG
GGGAAAGCTGAAGCTGTACACAGGGGAGGCCTGCAGGACAGGGGACAGATGACTCGAGCGG

| | | | |
|---|---|---|---|
| NOV3i, CG127616-08 | | | |
| Protein Sequence | SEQ ID NO: 112 | 104 aa | MW at 11567.4 kD |

MGVHECPAWLWLLLSLLSLPLGLPVLGAPPRLICDSRVLERYLLEAKEAENITKEAISPPDAASAAPL
RTITADTFRKLFRVYSNFLRGKLKLYTGEACRTGDR

| | | |
|---|---|---|
| NOV3j, CG127616-09 | SEQ ID NO: 113 | 330 bp |
| DNA Sequence | ORF Start: at 22 | ORF Stop: at 322 |

CGCGGATCCATGGGGGTGCACGAATGTCCTGCCTGGCTGTGGCTTCTCCTGTCCCTGCTGTCGCTCCC
TCTGGGCCTCCCAGTCCTGGGCGCCCCACCACGCCTCATCTGTGACAGCCGAGTCCTGGAGAGGTACC
TCTTGGAGGCCAAGGAGGCCGAGAATATCACGAAGGAAGCCATCTCCCCTCCAGATGCGGCCTCAGCT
GCTCCACTCCGAACAATCACTGCTGACACTTTCCGCAAACTCTTCCGAGTCTACTCCAATTTCCTCCG
GGGAAAGCTGAAGCTGTACACAGCGGAGGCCTCCACGACAGGGGACAGACTCGAGCGG

| | | | |
|---|---|---|---|
| NOV3j, CG127616-09 | | | |
| Protein Sequence | SEQ ID NO: 114 | 100 aa | MW at 11142.8 kD |

ECPAWLWLLLSLLSLPLGLPVLGAPPRLICDSRVLERYLLEAKEAENITKEAISPPDAASAAPLRTIT
ADTFRKLFRVYSNFLRGKLKLYTGEACRTGDR

[0319] A ClustalW comparison of the above protein sequences yields the following sequence alignment shown in Table 3B.

TABLE 3B
Comparison of the NOV3 protein sequences.

| | |
|---|---|
| NOV3a | ----MGVHECPAWLWLLLSLLSLPLGLPVLGAPPRLICDSRVLERYLLEAKEAENITK-- |
| NOV3b | ---WLSVLECPAWLWLLLSLLSLPLGLPVLGAPPRLICDSRVLERYLLEAKEAENITK-- |
| NOV3c | RGSTMGVHECPAWLWLLLSLLSLPLGLPVLGAPPRLICDSRVLERYLLEAKEAENITK-- |
| NOV3d | ---WLSVLECPAWLWLLLSLLSLPLGLPVLGAPPRLICDSRVLERYLLEAKEAENITTGC |
| NOV3e | --------------WLLLSLLSLPLGLPVLGAPPRLICDSRVLERYLLEAKEAENITK-- |
| NOV3f | ----MEVGQQAVEVWQGLALLSEAV----LRGQALLVNSSQPWEPLQLHVDKAVSGLRSL |
| NOV3g | ----MEVGQQAVEVWQGLALLSEAV----LRGQALLVNSSQPWEPLQLHVDKAVSGLRSL |
| NOV3h | ----MEVGQQAVEVWQGLALLSEAV----LRGQALLVNSSQPWEPLQLHVDKAVSGLRSL |
| NOV3i | ----MGVHECPAWLWLLLSLLSLPLGLPVLGAPPRLICDSRVLERYLLEAKEAENITK-- |
| NOV3j | --------ECPAWLWLLLSLLSLPLGLPVLGAPPRLICDSRVLERYLLEAKEAENITK-- |
| NOV3a | ------------------------------------------------------------ |
| NOV3b | ------------------------------------------------------------ |
| NOV3c | ------------------------------------------------------------ |
| NOV3d | AEHCSLNENITVPDTKVNFYAWKRMEVGQQAVEVWQGLALLSEAVLRGQALLINSSQPWE |
| NOV3e | ------------------------------------------------------------ |
| NOV3f | TTLLRALG---------------------------------------------------- |
| NOV3g | TTLLRALG---------------------------------------------------- |
| NOV3h | TTLLRALG---------------------------------------------------- |
| NOV3i | ------------------------------------------------------------ |
| NOV3j | ------------------------------------------------------------ |
| NOV3a | ---------------------------EAISPPDAASAAPLRTITADTFRKLFRVYSNFL |
| NOV3b | ---------------------------EAISPPDAASAAPLRTITADTFRKLFRVYSNFL |
| NOV3c | ---------------------------EAISPPDAASAAPLRTITADTFRKLFRVYSNFL |
| NOV3d | PLQLHVDKAVSCLRSLTTLLPALGAQKEAISPPDAASAAPLRTITADTFRKLFRVYSNFL |
| NOV3e | ---------------------------EAISPPDAASAAPLRTITADTFRKLFRVYSNFL |
| NOV3f | ------------------------AQKEAISPPDAASAAPLRTITADTFRKLFRVYSNFL |
| NOV3g | ------------------------AQKEAISPPDAASAAPLRTITADTFRKLFRVYSNFL |
| NOV3h | ------------------------AQKEAISPPDAASAAPLRTITADTFRKLFRVYSNFL |
| NOV3i | ---------------------------EAISPPDAASAAPLRTITADTFRKLFRVYSNFL |
| NOV3j | ---------------------------EAISPPDAASAAPLRTITADTFRKLFRVYSNFL |
| NOV3a | RGKLKLYTGEACRTGDR |
| NOV3b | RGKLKLYTGEACRTGDR |
| NOV3c | RGKLKLYTGEACRTGDR |
| NOV3d | RGKLKLYTGEACRTGDR |
| NOV3e | RGKLKLYTGEACR---- |
| NOV3f | RGKLKLYTGEACRTGDR |
| NOV3g | RGKLKLYTGEACRTGDR |
| NOV3h | RGKLKLYTGEACRTGDR |
| NOV3i | RGKLKLYTGEACRTGDR |
| NOV3j | RGKLKLYTGEACRTGDR |
| NOV3a | (SEQ ID NO: 102) |
| NOV3b | (SEQ ID NO: 104) |
| NOV3c | (SEQ ID NO: 106) |
| NOV3d | (SEQ ID NO: 108) |
| NOV3e | (SEQ ID NO: 110) |
| NOV3f | (SEQ ID NO: 112) |
| NOV3g | (SEQ ID NO: 114) |
| NOV3h | (SEQ ID NO: 116) |
| NOV3i | (SEQ ID NO: 118) |
| NOV3j | (SEQ ID NO: 120) |

[0320] Further analysis of the NOV3a protein yielded the following properties shown in Table 3C.

TABLE 3C
Protein Sequence Properties NOV3a

| SignalP analysis: | Cleavage site between residues 28 and 29 | | | |
|---|---|---|---|---|
| PSORT II | PSG: a new signal peptide prediction method | | | |
| analysis: | N-region: length 5; pos.chg 0; neg.chg 1 | | | |
| | H-region: length 25; peak value 0.00 | | | |
| | PSG score: −4.40 | | | |
| | GvH: von Heijne's method for signal seq. recognition | | | |
| | GvH score (threshold: −2.1): 1.97 | | | |
| | possible cleavage site: between 22 and 23 | | | |
| | >>> Seems to have no N-terminal signal peptide | | | |
| | ALOM: Klein et al's method for TM region allocation | | | |
| | Init position for calculation: 1 | | | |
| | Tentative number of TMS(s) for the threshold 0.5: 1 | | | |
| | Number of TMS(s) for threshold 0.5: 1 | | | |
| | INTEGRAL | Likelihood = −4.88 Transmembrane 10-26 | | |
| | PERIPHERAL | Likelihood = 11.09 (at 56) | | |
| | ALOM score: −4.88 (number of TMSs: 1) | | | |
| | MTOP: Prediction of membrane topology (Hartmann et al.) | | | |
| | Center position for calculation: 17 | | | |
| | Charge difference: −0.5 C(0.0)-N(0.5) | | | |
| | N >= C: N-terminal side will be inside | | | |
| | >>> membrane topology: type 2 (cytoplasmic tail 1 to 10) | | | |
| | MITDISC: discrimination of mitochondrial targeting seq | | | |
| | R content: | 1 | Hyd Moment (75): | 6.40 |
| | Hyd Moment (95): | 3.98 | G content: | 3 |
| | D/E content: | 2 | S/T content: | 2 |

```
Score: −7.17
Gavel: prediction of cleavage sites for mitochondrial preseq
R-2 motif at 41 PRL|IC
NUCDISC: discrimination of nuclear localization signals
pat4: none
pat7: none
bipartite: none
content of basic residues: 13.5%
NLS Score: −0.47
KDEL: ER retention motif in the C-terminus: none
ER Membrane Retention Signals: none
SKL: peroxisomal targeting signal in the C-terminus: none
PTS2: 2nd peroxisomal targeting signal: none
VAC: possible vacuolar targeting motif: none
RNA-binding motif: none
Actinin-type actin-binding motif:
type 1: none
type 2: none
NMYR: N-myristoylation pattern: none
Prenylation motif: none
memYQRL: transport motif from cell surface to Golgi: none
Tyrosines in the tail: none
Dileucine motif in the tail: none
checking 63 PROSITE DNA binding motifs: none
checking 71 PROSITE ribosomal protein motifs: none
checking 33 PROSITE prokaryotic DNA binding motifs: none
NNCN: Reinhardt's method for Cytoplasmic/Nuclear discrimination
Prediction: cytoplasmic
Reliability: 76.7
COIL: Lupas's algorithm to detect coiled-coil regions
total: 0 residues
Final Results (k = 9/23):
30.4%: mitochondrial
26.1%: cytoplasmic
13.0%: Golgi
  8.7%: vacuolar
  8.7%: endoplasmic reticulum
  4.3%: extracellular, including cell wall
  4.3%: nuclear
  4.3%: vesicles of secretory system
>> prediction for CG127616-01 is mit (k = 23)
```

[0321] A search of the NOV3a protein against the Geneseq database, a proprietary database that contains sequences published in patents and patent publication, yielded several homologous proteins shown in Table 3D.

TABLE 3D
Geneseq Results for NOV3a

| | | | Identities/ | |
|---|---|---|---|---|
| | | NOV3a | Similarities | |
| | | Residues/ | for the | |
| Geneseq | Protein/Organism/Length [Patent | Match | Matched | Expect |
| Identifier | #, Date] | Residues | Region | Value |
| AAW14143 | Erythropoietin variant JM - Homo | 1 . . . 54 | 54/54 (100%) | 2e−25 |
| | sapiens, 193 aa. [WO9708307-A1, | 1 . . . 54 | 54/54 (100%) | |
| | 06 MAR. 1997] | | | |
| AAE32131 | Human erythropoietin protein - | 1 . . . 53 | 53/53 (100%) | 6e−25 |
| | Homo sapiens, 193 aa. | 1 . . . 53 | 53/53 (100%) | |
| | [WO200285940-A2, 31 OCT. 2002] | | | |
| AAE15348 | Human erythropoietin (Epo) N47-Fc | 1 . . . 53 | 53/53 (100%) | 6e−25 |
| | fusion protein - Homo sapiens, 420 | 1 . . . 53 | 53/53 (100%) | |
| | aa. [WO200181405-A2, 01 NOV. | | | |
| | 2001] | | | |
| AAE15341 | Human erythropoietin (Epo) | 1 . . . 53 | 53/53 (100%) | 6e−25 |
| | protein - Homo sapiens, 193 aa. | 1 . . . 53 | 53/53 (100%) | |
| | [WO200181405-A2, 01 NOV. 2001] | | | |
| ABB79939 | Human erythropoietin-HCG C- | 1 . . . 53 | 53/53 (100%) | 6e−25 |
| | terminal peptide fusion protein | 1 . . . 53 | 53/53 (100%) | |
| | ECTP - Homo sapiens, 220 aa. | | | |
| | [WO200248194-A1, 20 JUN. 2002] | | | |

[0322] In a BLAST search of public sequence databases, the NOV3a protein was found to have homology to the proteins shown in the BLASTP data in Table 3E.

TABLE 3E
Public BLASTP Results for NOV3a

| | | NOV3a | Identities/ | |
|---|---|---|---|---|
| Protein | | Residues/ | Similarities for | |
| Accession | | Match | the Matched | Expect |
| Number | Protein/Organism/Length | Residues | Portion | Value |
| P01588 | Erythropoietin precursor (Epoetin) - | 1 . . . 53 | 53/53 (100%) | 2e−24 |
| | Homo sapiens (Human), 193 aa. | 1 . . . 53 | 53/53 (100%) | |
| P07865 | Erythropoietin precursor - Macaca | 1 . . . 53 | 50/53 (94%) | 3e−23 |
| | fascicularis (Crab eating macaque) | 1 . . . 53 | 52/53 (97%) | |
| | (Cynomolgus monkey), 192 aa. | | | |
| Q28513 | Erythropoietin precursor - Macaca | 1 . . . 53 | 49/53 (92%) | 4e−23 |
| | mulatta (Rhesus macaque), 192 aa. | 1 . . . 53 | 52/53 (97%) | |
| CAC41224 | Sequence 1 from Patent | 41 . . . 104 | 54/64 (84%) | 2e−22 |
| | WO0136489 - Homo sapiens | 103 . . . 166 | 54/64 (84%) | |
| | (Human), 166 aa (fragment). | | | |
| Q867B1 | Erythropoietin - Equus caballus | 41 . . . 104 | 47/64 (73%) | 1e−18 |
| | (Horse), 192 aa. | 129 . . . 192 | 48/64 (74%) | |

[0323] PFam analysis predicts that the NOV3a protein contains the domains shown in the Table 3F.

TABLE 3F
Domain Analysis of NOV3a

| | | Identities/ | |
|---|---|---|---|
| | | Similarities | |
| | NOV3a Match | for the | Expect |
| Pfam Domain | Region | Matched Region | Value |
| EPO_TPO | 11 . . . 104 | 77/185 (42%) | 6e−13 |
| | | 92/185 (50%) | |

### Example 4

[0324] The NOV4 clone was analyzed, and the nucleotide and encoded polypeptide sequences are shown in Table 4A.

TABLE 4A
NOV4 Sequence Analysis

| | | |
|---|---|---|
| NOV4a, CG54455-03 | SEQ ID NO: 115 | 510 bp |
| DNA Sequence | ORF Start: ATG at 1 | ORF Stop: end of sequence |

ATGCGCCGCCGCCTGTGGCTGGGCCTGGCCTGGCTGCTGCTGGCGCGGGCGCCGGACGCCGCGGGAAC
CCCGAGCGCGTCGCGGGGACCGCGCAGCTACCCGCACCTGGAGGGCGACGTGCGCTGGCGGCGCCTCT
TCTCCTCCACTCACTTCTTCCTGCCCGTGGATCCCGGCGGCCGCGTGCAGGGCACCCGCTGGCGCCAC
GGCCAGGACAGCATCCTGCAGATCCGCTCTGTACACGTGGGCGTCGTGGTCATCAAAGCAGTGTCCTC
AGGCTTCTACGTGGCCATGAACCGCCGGGGCCGCCTCTACGGGTCGCGACTCTACACCGTGGACTGCA
GGTTCCGGGAGCGCATCGAAGAGAACGGCCACAACACCTACGCCTCACAGCGCTGGCGCCGCCGCGGC
CAGCCCATGTTCCTGGCGCTGGACAGGAGGGGGGGGCCCCGGCCAGGCGGCCGGACGCGGCGGTAGCA
CCTGTCCGCCCACTTCCTGCCCGTCCTGGTCTCC

| | | | |
|---|---|---|---|
| NOV4a, CG54455-03 | | | |
| Protein Sequence | SEQ ID NO: 116 | 170 aa | MW at 19662.4 kD |

MRRRLWLGLAWLLLARAPDAAGTPSASRGPRSYPHLEGDVRWRRLFSSTHFFLRVDPGGRVQGTRWRH
GQDSILEIRSVHVGVVVIKAVSSGFYVAMNRRGRLYGSRLYTVDCRFRERIEENGHNTYASQRWRRRG
QPMFLALDRRGGPRPGGRTRRYHLSAHFLPVLVS

| | | |
|---|---|---|
| NOV4b, 260403849 | SEQ ID NO: 117 | 527 bp |
| DNA Sequence | ORF Start: at 3 | ORF Stop: end of sequence |

AGATCTCCACCATGCGCCGCCGCCTGTGGCTGGGCCTGGCCTGGCTGCTGCTGGCGCGGGCGCCGGAC
GCCGCGGGAACCCCGAGCGCGTCGCGGGGACCGCGCAGCTACCCGCACCTCGAGGGCGACGTGCGCTG
GCGGCGTCTCTTCTCCTCCACTCACTTCTTCCTGCGCGTGGATCCCGGCCGCCGCGTGCAGGGCACCC
GCTGGCGCCACGGCCAGGACAGCATCCTGGAGATCCGCTCTGTACACGTGGGCGTCGTGGTCATCAAA
GCAGTGTCCTCAGGCTTCTACGTGGCCATGAACCGCCGGGGCCGCCTCTACGGGTCGCGACTCTACAC
CGTGGACTGCAGGTTCCGGGAGCGCATCGAAGAGAACGGCCACAACACCTACGCCTCACAGCGCTGGC
GCCGCCCCGGCCAGCCCATGTTCCTGGCGCTGGACAGGAGGGGGGGGCCCCGGCCAGGCGGCCGGACG
CGGCGGTACCACCTGTCCGCCCACTTCCTGCCCGTCCTGGTCTCCCTCGAG

| | | | |
|---|---|---|---|
| NOV4b, 260403849 | | | |
| Protein Sequence | SEQ ID NO: 118 | 175 aa | MW at 20206.0 kD |

ISTMRRRLWLGLAWLLLARAPDAAGTPSASRGPRSYPHLECDVRWRRLFSSTHFFLRVDPGGRVQGTR
WRHGQDSILEIRSVHVGVVVIKAVSSGFYVAMNRRGRLYGSRLYTVDCRFRERIEENCHNTYASQRWR
RRGQPMFLALDRRGGPRPGGRTRRYHLSAHFLPVLVSLE

| | | |
|---|---|---|
| NOV4c, CG54455-07 | SEQ ID NO: 119 | 527 bp |
| DNA Sequence | ORF Start: ATG at 12 | ORF Stop: at 522 |

AGATCTCCACCATGCGCCGCCGCCTGTGGCTGGGCCTGGCCTGGCTGCTGCTGGCGCGGGCGCGGGAC
GCCGCGGCAACCCCGAGCGCGTCGCGGGGACCGCGCAGCTACCCGCACCTGGAGGGCGACGTGGGCTG
GCGGCGTCTCTTCTCCTCCACTCACTTCTTCCTGCGCGTGGATCCCGGCGGCCGCGTGCAGGGCACCC
GCTGGCGCCACGGCCAGGACAGCATCCTGGAGATCCGCTCTGTACACGTGGGCGTCGTGGTCATCAAA
GCAGTGTCCTCAGGCTTCTACGTGGCCATGAACCGCCGGGGCCGCCTCTACGGGTCGCGACTCTACAC
CGTGGACTGCAGGTTCCGGGAGCGCATCGAAGAGAACGGCCACAACACCTACGCCTCACAGCGCTGGC
GCCGCCGCGGCCAGCCCATGTTCCTGGCGCTGGACAGGAGGGGGGGGCCCCGGCCAGGCGGCCGGACG
CGGCGGTACCACCTGTCCGCCCACTTCCTGCCCGTCCTGGTCTCCCTCGAG

| | | | |
|---|---|---|---|
| NOV4c, CG54455-07 | | | |
| Protein Sequence | SEQ ID NO: 120 | 170 aa | MW at 19662.4 kD |

MRRRLWLGLAWLLLARAPDAAGTPSASRGPRSYPHLEGDVRWRRLFSSTHFFLRVDPGGRVQGTRWRH
GQDSILEIRSVHVGVVVIKAVSSGFYVAMNRRGRLYGSRLYTVDCRFRERIEENGHNTYASQRWRRRG
QPMFLALDRRGGPRPGGRTRRYHLSAHFLPVLVS

| | | |
|---|---|---|
| NOV4d, 306448506 | SEQ ID NO: 121 | 529 bp |
| DNA Sequence | ORF Start: at 2 | ORF Stop: TAG at 518 |

CACCCATATGCGCCGCCGCCTGTGGCTGGGCCTGGCCTGGCTGCTGCTGGCGCGGGCGCCGGACGCCG
CGGGAACCCCGAGCGCGTCGCGGGGACCGCGCAGCTACCCGCACCTGGAGGGCGACGTGCGCTGGCGG
CGTCTCTTCTCCTCCACTCACTTCTTCCTGCGCGTGGATCCCGGCGCCCGCGTGCAGGGCACCCGCTG
GCGCCACGGCCAGGACAGCATCCTGGAGATCCGCTCTGTACACGTGGGCGTCGTGGTCATCAAAGCAG
TGTCCTCAGGCTTCTACGTGGCCATGAACCGCCGGGGCCGCCTCTACGGGTCGCGACTCTACACCGTG
GACTGCAGGTTCCGGGAGCGCATCGAAGAGAACGGCCACAACACCTACGCCTCACAGCGCTGGCGCCG
CCGCGGCCAGCCCATGTTCCTGGCGCTGGACAGGAGGGGGGGGCCCCGGCCAGGCGGCCGGACGCGGC
GGTACCACCTGTCCGCCCACTTCCTGCCCGTCCTGGTCTCCTAGCTCGAGGGC

| | | | |
|---|---|---|---|
| NOV4d, 306448506 | | | |
| Protein Sequence | SEQ ID NO: 122 | 172 aa | MW at 19900.6 kD |

THMRRRLWLGLAWLLLARAPDAAGTPSASRGPRSYPHLEGDVRWRRLFSSTHFFLRVDPGGRVQGTRW
RHGQDSILEIRSVHVGVVVIKAVSSGFYVAMNRRGRLYGSRLYTVDCRFRERIEENGHNTYASQRWRR
RGQPMFLALDRRGGPRPGGRTRRYHLSAHFLPVLVS

| | | |
|---|---|---|
| NOV4e, CG54455-01 | SEQ ID NO: 123 | 1340 bp |
| DNA Sequence | ORF Start: ATG at 130 | ORF Stop: TGA at 640 |

CCATTGGCCGGCGTCCCCGCCCCAGCGAACCCGGCCCCGCCCCCGAGGCGCCCCATTGGCCCCGCCGC
GCGAAGGCAGAGCCGCGGACGCCCGGGAGCGACGAGCGCGCAGCCAACCGGGTGCCGGGTCATGCGCC
GCCGCCTGTGGCTGGGCCTGGCCTGGCTGCTGCTGGCGCGGGCGCCGGACGCCGCGGGAACCCCGAGC
GCGTCGCGGGGACCGCGCAGCTACCCGCACCTGGAGGGCGACGTGCGCTGGCGGCGCCTCTTCTCCTC
CACTCACTTCTTCCTGCGCGTGGATCCCGGCGGCCGCGTGCAGGGCACCCGCTGGCGCCACGGCCAGG
ACAGCATCCTGGAGATCCGCTCTGTACACGTGGGCGTCGTGGTCATCAAAGCAGTGTCCTCAGGCTTC
TACGTGGCCATGAACCGCCGGGGCCGCGTCTACGGGTCGCGACTCTACACCGTGGACTGCAGGTTCCG
GGAGCGCATCGAAGAGAACGGCCACAACACCTACGCCTCACAGCGCTGGCGCCGCCGCGGCCAGCCCA
TGTTCCTGGCGCTGGACAGGAGGGGGGGGCCCCGGCCAGGCGGCCGGACGCGGCGGTACCACCTGTCC
GCCCACTTCCTGCCCGTCCTGGTCTCCTGAGGCCCTGAGAGGCCGGCGGCTCCCCAAGCCATTGGCCG
GCGTCCCCGCCCCAGCCAACCCGGCCCCGCCCCCCAGGCGCCCCATTGCCCCCGCCGCGCGAAGGCAG
AGCCGCGGACGCCCGGGAGCGACGAGCGCGCAGCGAACCGGGTGCCGGGTCATGCCCCGCCGCCTGTG
GCTGGGCCTGGCCTGGCTGCTGCTGGCGCGGGCGCCGGACGCCGCGGGAACCCCGAGCGCGTCGCGGC
GACCGCGCAGCTACCCGCACCTGGAGGGCGACGTGCGCTGGCGGCGCCTCTTCTCCTCCACTCACTTC
TTCCTGCGCGTGGATCCCGGCGGCCGCGTGCAGGGCACCCGCTGGCGCCACGGCCAGGACAGCATCCT
GGAGATCCGCTCTGTACACGTGGGCGTCGTGGTCATCAAAGCAGTGTCCTCAGGCTTCTACGTGGCCA
TGAACCGCCGGGGCCGCCTCTACGGGTCGCGACTCTACACCGTGGACTGCAGGTTCCGGGAGCGCATC
GAAGAGAACGGCCACAACACCTACGCCTCACAGCGCTGGCGCCGCCGCGGCCAGCCCATGTTCCTGGC
GCTGGACAGGAGGGGCGGGCCCCGGCCAGGCGGCCGGACGCGGCGGTACCACCTGTCCGCCCACTTCC
TGCCCGTCCTGGTCTCCTGAGGCCCTGAGAGGCCGGCGGCTCCCCAAG

| | | | |
|---|---|---|---|
| NOV4e, CG54455-01 | | | |
| Protein Sequence | SEQ ID NO: 124 | 170 aa | MW at 19662.4 kD |

MRRRLWLGLAWLLLARAPDAAGTPSASRGPRSYPHLEGDVRWRRLFSSTHFFLRVDPGGRVQGTRWRH
GQDSILEIRSVHVGVVVIKAVSSGFYVAMNRRGRLYGSRLYTVDCRFRERIEENGHNTYASQRWRRRG
QPMFLALDRRGGPRPGGRTRRYHLSAHFLPVLVS

| | | |
|---|---|---|
| NOV4f, CG54455-02 | SEQ ID NO: 125 | 943 bp |
| DNA Sequence | ORF Start: at 3 | ORF Stop: TGA at 483 |

TAGGCCGCCTCTGGCTGGGCCTAGCCTGGCTGCTGTTGACGCGGGCACCGGGCGCTCCGGGAGGGTAC
CCGCATCTGGAGGGCGACGTGCGCTGGCGCCGCCTCTTCTCCTCCACTCACTTTTTCCTGCGTGTGGA
CCTTGGTGGTCGGGTGCAGGGGAGGCGTTGGCGGCACGGCCAGGACAGTATAGTGGAGATCCGTTCTG
TCCGTGTGGGCACTGTGGTGATCAAAGCTGTGTACTCAGGCTTCTATGTGGCCATGAATCGCAGGGGC
CGCCTCTATGGGTCGCGGGTCTACTCTGTGGACTGTAGGTTCCGGGAGCGCATCGAGGAGAACGGCTA
CAACACATACGCCTCGCGACGTTGGAGGCACCGCGGCCGACCCATGTTCCTGGCACTTGACAGCCAAG
GCATTCCCAGGCAAGGCAGACGGACACGACGGCACCAACTGTCCACACACTTCCTGCCAGTCTTGGTC
TCGTCTTGAAGGGCCTGCCAATGGTTCACGAGGCATGGGCGGCACACAGGCCCTGGAAGATCCGGACC
TGAACAACCAAGGGCCAGGCCAGAGACCCTGGGCCAACACGAGTCTTTATGTCACAAGCCGGGCCCCC
GCTGGCTGCCGGGCATGGAGACATGGCAGGGTCCCTGCAAGTGAACCCAGCGCTCAGGGGGATACACA
GAACTGGCAGTTTGCATCCATCTAGTTTGCAGATGAGAACACTCTGGGCACACCACGGAGAGGTTTGC
AGGTGGGAACACACACCAGGTGGATGAGGAAAGCAGGCAGGGAGGACCGGGGAGGGTGGACATGTCAC
GGAGGGCAGGGCCCGCGTCAGTGGGGACAGAGACATGTTCGCCCATGTGGCCGAAGCTTGGGGCTGGA
GTTAAGAGCACTTCTTGCTCTTCCAAGGGGCCTGAGTTTAATTCTTCCACATCAGGCTG

| | | | |
|---|---|---|---|
| NOV4f, CG54455-02 | | | |
| Protein Sequence | SEQ ID NO: 126 | 160 aa | MW at 18639.2 kD |

GRLWLGLAWLLLTRAPGAPGGYPHLEGDVRWRRLFSSTHFFLRVDLGGRVQGTRWRHGQDSIVEIRSV
RVGTVVIKAVYSGFYVAMNRRGRLYGSRVYSVDCRFRERIEENGYNTYASRRWRHRGRPMFLALDSQG
IPRQGRRTRRHQLSTHFLPVLVSS

| | | |
|---|---|---|
| NOV4g, CG54455-04 | SEQ ID NO: 127 | 444 bp |
| DNA Sequence | ORF Start: at 1 | ORF Stop: end of sequence |

ACCCCGAGCGCGTCGCGGCGACCGCGCAGCTACCCGCACCTGGACGGCGACGTGCGCTGGCGGCGCCT
CTTCTCCTCCACTCACTTCTTCCTGCGCCTGGATCCCGGCGGCCGCGTGCAGGGCACCCGCTGGCGCC
ACGGCCAGGACAGCATCCTGGAGATCCGCTCTGTACACGTGGGCGTCGTGGTCATCAAAGCAGTGTCC
TCAGGCTTCTACGTGGCCATGAACCGCCGGGGCCGCCTCTACGGGTCGCGACTCTACACCGTGGACTG
CAGGTTCCGGGAGCGCATCGAAGAGAACGGCCACAACACCTACGCCTCACAGCGCTGGCGCCGCCGCG
GCCAGCCCATGTTCCTGCCGCTGGACAGGAGGGGGGGGCCCCGGCCAGGCCGCCGGACGCGGCGGTAC
CACCTGTCCGCCCACTTCCTGCCCGTCCTGGTCTCC

| | | | |
|---|---|---|---|
| NOV4g, CG54455-04 | | | |
| Protein Sequence | SEQ ID NO: 128 | 148 aa | MW at 17173.4 kD |

TPSASRGPRSYPHLEGDVRWRRLFSSTHFFLRVDPGGRVQGTRWRHGQDSILEIRSVHVGVVVIKAVS
SGFYVAMNRRCRLYGSRLYTVDCRFRERIEENGHNTYASQRWRRRGQPMFLALDRRGGPRPGGRTRRY
HLSAHFLPVLVS

| | | |
|---|---|---|
| NOV4h, CG54455-05 | SEQ ID NO: 129 | 550 bp |
| DNA Sequence | ORF Start: ATG at 19 | ORF Stop: TGA at 529 |

CGAACCGGGTGCCGGGTCATGCGCCGCCGCCTGTGGCTGGGCCTGGCCTGGCTGCTGCTGGCGCGGGC
GCCGGACGCCCCGGGAACCCCGAGCGCGTCGCCGGGACCGCGCAGCTACCCGCACCTGGAGGGCGACG
TGCGCTGGCGGCGCCTCTTCTCCTCCACTCACTTCTTCCTGCGCGTGGATCCCGGCGGCCGCGTGCAG
GGCACCCGCTGGCGCCACGGCCAGGACAGCATCCTGGAGATCCGCTCTGTACACGTGGGCGTCGTGGT
CATCAAAGCAGTGTCCTCAGGCTTCTACGTGGCCATGAACCGCCGGGGCCGCCTCTACGGGTCGCGAC
TCTACACCGTGGACTGCAGGTTCCGGGAGCCCATCGAAGAGAACGGCCACAACACCTACGCCTCACAG
CGCTGGCGCCGCCGCGGCCAGCCCATGTTCCTGGCGCTGGACAGGAGGGGGGGGCCCCGGCCAGGCGG
CCGGACGCGGCGGTACCACCTGTCCGCCCACTTCCTGCCCGTCCTGGTCTCCTGAGGCCCTGAGAGGC
CGGCGG

| | | | |
|---|---|---|---|
| NOV4h, CG54455-05 | | | |
| Protein Sequence | SEQ ID NO: 130 | 170 aa | MW at 19662.4 kD |

MRRRLWLGLAWLLLARAPDAAGTPSASRGPRSYPHLEGDVRWRRLFSSTHFFLRVDPGGRVQGTRWRH
GQDSILEIRSVHVGVVVIKAVSSGFYVAMNRRGRLYGSRLYTVDCRFRERIEENGHNTYASQRWRRRG
QPMFLALDRRGGPRPGGRTRRYHLSAHFLPVLVS

| | | |
|---|---|---|
| NOV4i, CG54455-06 | SEQ ID NO: 131 | 456 bp |
| DNA Sequence | ORF Start: at 7 | ORF Stop: at 451 |

AGATCTACCCCGAGCGCGTCGCGGGGACCGCGCAGCTACCCGCACCTGGAGGGCGACGTGCGCTGGCG
GCGTCTCTTCTCCTCCACTCACTTCTTCCTGCGCGTGGATCCCGGCGGCCGCGTGCAGGGCACCCGCT
GGCGCCACGGCCAGGACAGCATCCTGGAGATCCGCTCTGTACACGTGGGCGTCGTGGTCATCAAAGCA
GTGTCCTCAGGCTTCTACGTGGCCATGAACCGCCGGGGCCGCCTCTACGGGTCGCGACTCTACACCGT
GGACTGCAGGTTCCGGGAGCGCATCGAAGAGAACGGCCACAACACCTACGCCTCACAGCGCTGGCGCC
GCCGCGGCCAGCCCATGTTCCTGGCGCTGGACAGGAGGGGGGGGCCCCGGCCAGGCGGCCGGACGCGG
CCGTACCACCTGTCCGCCCACTTCCTGCCCGTCCTGGTCTCCCTCGAG

| | | | |
|---|---|---|---|
| NOV4i, CG54455-06 | | | |
| Protein Sequence | SEQ ID NO: 132 | 148 aa | MW at 17173.4 kD |

TPSASRGPRSYPHLEGDVRWRRLFSSTHFFLRVDPGGRVQGTRWRHGQDSILEIRSVHVGVVVIKAVS
SGFYVAMNRRGRLYGSRLYTVDCRFRERTEENGHNTYASQRWRRRGQPMFLALDRRGGPRPGGRTRRY
HLSAHFLPVLVS

| | | |
|---|---|---|
| NOV4j, CG54455-08 | SEQ ID NO: 133 | 538 bp |
| DNA Sequence | ORF Start: ATG at 17 | ORF Stop: TAG at 527 |

CACCGAGCTCCCCACCATGCGCCGCCGCCTGTGGCTGGGCCTGGCCTGGCTGCTGCTGGCGCGGGCGC
CGGACGCCGCGGGAACCCCGAGCGCGTCGCGGGGACCGCGCAGCTACCCGCACCTGGAGGGCGACGTG
CGCTGGCGGCGTCTCTTCTCCTCCACTCACTTCTTCCTGCGCGTGGATCCCGGCGGCCGCGTGCAGGG
CACCCGCTGGCGCCACGGCCAGGACAGCATCCTGGAGATCCGCTCTGTACACGTGGGCGTCGTGCTCA
TCAAAGCAGTGTCCTCAGGCTTCTACGTGGCCATGAACCGCCGGGGCCGCCTCTACGGGTCGCGACTC
TACACCGTGGACTGCAGGTTCCCGGAGCGCATCGAACAGAACGGCCACAACACCTACGCCTCACAGCG
CTGGCGCCGCCGCGGCCAGCCCATGTTCCTGGCCCTGGACAGGAGGGGGGGGCCCCGGCCAGGCGGCC
GGACGCGGCGGTACCACCTGTCCGCCCACTTCCTGCCCGTCCTGGTCTCCTAGGTCGACGGC

| | | | |
|---|---|---|---|
| NOV4j, CG54455-08 | | | |
| Protein Sequence | SEQ ID NO: 134 | 170 aa | MW at 19662.4 kD |

MRRRLWLGLAWLLLARAPDAAGTPSASRGPRSYPHLEGDVRWRRLFSSTHFFLRVDPGGRVQGTRWRH
GQDSILEIRSVHVGVVVIKAVSSGFYVAMNRRGRLYGSRLYTVDCRFRERIEENGHNTYASQRWRRRG
QPMFLALDRRGGPRPGGRTRRYHLSAHFLPVLVS

| | | |
|---|---|---|
| NOV4k, CG54455-09 | SEQ ID NO: 135 | 530 bp |
| DNA Sequence | ORF Start: ATG at 12 | ORF Stop: TAG at 528 |

AGATCTCCACCATGCGCCCCCGCCTGTGGCTGGGCCTGGCCTGGCTGCTGCTGGCGCGGGCGCCCGAC
GCCGCGGGAACCCCGAGCGCGTCGCGGGGACCGCGCAGCTACCCGCACCTGGAGGGCGACGTGCGCTG
GCGGCGTCTCTTCTCCTCCACTCACTTCTTCCTGCCCGTGGATCCCGGCGGCCGCGTGCAGGGCACCC
GCTGCCGCCACGGCCAGGACAGCATCCTGGAGATCCGCTCTGTACACGTGGGCGTCGTGGTCATCAAA
GCAGTGTCCTCAGGCTTCTACGTGGCCATGAACCGCCGGGGCCGCCTCTACGGGTCGCGACTCTACAC
CGTGGACTGCAGGTTCCGGGAGCGCATCGAAGAGAACGGCTACAACACCTACGCCTCACAGCCCTGGC
GCCGCCGCGGCCAGCCCATGTTCCTGGCGCTGGACAGGAGGGGGGGGCCCCGGCCAGGCGGCCGGACG
CGGCGGTACCACCTGTCCGCCCACTTCCTGCCCGTCCTGGTCTCCCTCGAGTAG

| | | | |
|---|---|---|---|
| NOV4k, CG54455-09 | | | |
| Protein Sequence | SEQ ID NO: 136 | 172 aa | MW at 19930.7 kD |

MRRRLWLGLAWLLLARAPDAAGTPSASRGPRSYPHLEGDVRWRRLFSSTHFFLRVDPGGRVQGTRWRH
GQDSILEIRSVHVGVVVIKAVSSGFYVAMNRRGRLYGSRLYTVDCRFRERIEENGYNTYASQRWRRRG
QPMFLALDRRGGPRPGGRTRRYHLSAHFLPVLVSLE

| | | |
|---|---|---|
| | SEQ ID NO: 137 | 510 bp |
| NOV4l, SNP13379002 of | ORF Start: ATG at 1 | ORF Stop: end of sequence |
| CG54455-03, DNA Sequence | SNP Pos: 358 | SNP Change: G to A |

ATGCGCCGCCGCCTGTGGCTGGGCCTGGCCTGGCTGCTGCTGGCGCGGGCGCCGGACGCCGCGGGAAC
CCCCAGCGCGTCGCGGGGACCCCGCAGCTACCCGCACCTGGAGGGCGACGTGCGCTGGCGGCGCCTCT
TCTCCTCCACTCACTTCTTCCTGCGCGTGGATCCCGGCGGCCGCGTGCAGGGCACCCGCTGGCGCCAC
GGCCAGGACAGCATCCTGGAGATCCGCTCTGTACACGTGGGCGTCGTGGTCATCAAAGCAGTGTCCTC
AGGCTTCTACGTGGCCATGAACCGCCGGGGCCGCCTCTACGGGTCGCGACTCTACACCGTGGACTGCA
GGTTCCCGGAGCGCATCAAAGAGAACGGCCACAACACCTACGCCTCACAGCGCTGGCGCCGCCGCGGC
CAGCCCATGTTCCTGGCGCTGGACAGGAGGGGGGGGCCCCGGCCAGCCGGCCGGACGCGGCGGTACCA
CCTGTCCGCCCACTTCCTGCCCGTCCTGGTCTCC

| | | | |
|---|---|---|---|
| NOV4l, SNP13379002 of | SEQ ID NO: 138 | | MW at 19661.4 kD |
| CG54455-03, Protein Sequence | SNP Pos: 120 | 170 aa | SNP Change: Glu to Lys |

MRRRLWLGLAWLLLARAPDAAGTPSASRGPRSYPHLEGDVRWRRLFSSTHFFLRVDPGGRVQGTRWRH
GQDSILEIRSVHVGVVVIKAVSSGFYVAMNRRGRLYGSRLYTVDCRFRERIKENGHNTYASQRWRRRG
QPMFLALDRRGGPRPGGRTRRYHLSAHFLPVLVS

[0325] A ClustalW comparison of the above protein sequences yields the following sequence alignment shown in Table 4B.

TABLE 4B
Comparison of the NOV4 protein sequences.

| | |
|---|---|
| NOV4a | ---MRRRLWLGLAWLLLARAPDAAGTPSASRGPRSYPHLEGDVRWRRLFSSTHFFLRVDP |
| NOV4b | ISTMRRRLWLGLAWLLLARAPDAAGTPSASRGPRSYPHLEGDVRWRRLFSSTHFFLRVDP |
| NOV4c | ---MRRRLWLGLAWLLLARAPDAAGTPSASRGPRSYPHLEGDVRWRRLFSSTHFFLRVDP |
| NOV4d | -THMRRRLWLGLAWLLLARAPDAAGTPSASRGPRSYPHLEGDVRWRRLFSSTHFFLRVDP |
| NOV4e | ---MRRRLWLGLAWLLLARAPDAAGTPSASRGPRSYPHLEGDVRWRRLFSSTHFFLRVDP |
| NOV4f | -----GRLWLGLAWLLLTRAP---GAPGG------YPHLEGDVRWRRLFSSTHFFLRVDL |
| NOV4g | -------------------------TPSASRGPRSYPHLEGDVRWRRLFSSTHFFLRVDP |
| NOV4h | ---MRRRLWLGLAWLLLARAPDAAGTPSASRGPRSYPHLEGDVRWRRLFSSTHFFLRVDP |
| NOV4i | -------------------------TPSASRGPRSYPHLEGDVRWRRLFSSTHFFLRVDP |
| NOV4j | ---MRRRLWLGLAWLLLARAPDAAGTPSASRGPRSYPHLEGDVRWRRLFSSTHFFLRVDP |
| NOV4k | ---MRRRLWLGLAWLLLARAPDAAGTPSASRGPRSYPHLEGDVRWRRLFSSTHFFLRVDP |
| NOV4a | GGRVQGTRWRHGQDSILEIRSVHVGVVVIKAVSSGFYVAMNRRGRLYGSRLYTVDCRFRE |
| NOV4b | GGRVQGTRWRHGQDSILEIRSVHVGVVVIKAVSSGFYVAMNRRGRLYGSRLYTVDCRFRE |
| NOV4c | GGRVQGTRWRHGQDSILEIRSVHVGVVVIKAVSSGFYVAMNRRGRLYGSRLYTVDCRFRE |
| NOV4d | GGRVQGTRWRHGQDSILEIRSVHVGVVVIKAVSSGFYVAMNRRGRLYGSRLYTVDCRFRE |
| NOV4e | GGRVQGTRWRHGQDSILEIRSVHVGVVVIKAVSSGFYVAMNRRGRLYGSRLYTVDCRFRE |
| NOV4f | GGRVQGTRWRHGQDSIVEIRSVRVGTVVIKAVYSGFYVAMNRRGRLYGSRVYSVDCRFRE |
| NOV4g | GGRVQGTRWRHGQDSILEIRSVHVGVVVIKAVSSGFYVAMNRRGRLYGSRLYTVDCRFRE |
| NOV4h | GGRVQGTRWRHGQDSILEIRSVHVGVVVIKAVSSGFYVAMNRRCRLYGSRLYTVDCRFRE |
| NOV4i | GGRVQGTRWRHGQDSILEIRSVHVGVVVIKAVSSGFYVAMNRRGRLYGSRLYTVDCRFRE |
| NOV4j | GGRVQGTRWRHGQDSILEIRSVHVGVVVIKAVSSGFYVAMNRRGRLYGSRLYTVDCRFRE |
| NOV4k | GGRVQGTRWRHGQDSILEIRSVHVGVVVIKAVSSGFYVAMNRRGRLYGSRLYTVDCRFRE |
| NOV4a | RIEENGHNTYASQRWRRRGQPMFLALDRRGGPRPGGRTRRYHLSAHFLPVLVS-- |
| NOV4b | RIEENGHNTYASQRWRRRGQPMFLALDRRGGPRPGGRTRRYHLSAHFLPVLVSLE |
| NOV4c | RIEENGHNTYASQRWRRRGQPMFLALDRRGGPRPGGRTRRYHLSAHFLPVLVS-- |
| NOV4d | RIEENGHNTYASQRWRRRGQPMFLALDRRGGPRPGGRTRRYHLSAHFLPVLVS-- |
| NOV4e | RIEENGHNTYASQRWRRRGQPMFLALDRRGGPRPGGRTRRYHLSAHFLPVLVS-- |
| NOV4f | RIEENGYNTYASRRWRHRGRPMFLALDSQGIPRQGRRTRRHQLSTHFLPVLVSS- |
| NOV4g | RIEENGHNTYASQRWRRRGQPMFLALDRRGGPRPGGRTRRYHLSAHFLPVLVS-- |
| NOV4h | RIEENGHNTYASQRWRRRGQPMFLALDRRGGPRPGGRTRRYHLSAHFLPVLVS-- |
| NOV4i | RIEENGHNTYASQRWRRRGQPMFLALDRRGGPRPGGRTRRYHLSAHFLPVLVS-- |
| NOV4j | RIEENGHNTYASQRWRRRGQPMFLALDRRGGPRPGGRTRRYHLSAHFLPVLVS-- |
| NOV4k | RIEENGYNTYASQRWRRRGQPMFLALDRRGGPRPGGRTRRYHLSAHFLPVLVSLE |
| NOV4a | (SEQ ID NO: 116) |
| NOV4b | (SEQ ID NO: 118) |
| NOV4c | (SEQ ID NO: 120) |
| NOV4d | (SEQ ID NO: 122) |
| NOV4e | (SEQ ID NO: 124) |
| NOV4f | (SEQ ID NO: 126) |
| NOV4g | (SEQ ID NO: 128) |
| NOV4h | (SEQ ID NO: 130) |
| NOV4i | (SEQ ID NO: 132) |
| NOV4j | (SEQ ID NO: 134) |
| NOV4k | (SEQ ID NO: 136) |

[0326] Further analysis of the NOV4a protein yielded the following properties shown in Table 4C.

TABLE 4C
Protein Sequence Properties NOV4a

| SignalP analysis: | Cleavage site between residues 23 and 24 | | | |
|---|---|---|---|---|
| PSORT II | PSG: a new signal peptide prediction method | | | |
| analysis: | N-region: length 4; pos.chg 3; neg.chg 0 | | | |
| | H-region: length 11; peak value 9.66 | | | |
| | PSG score: 5.26 | | | |
| | GvH: von Heijne's method for signal seq. recognition | | | |
| | GvH score (threshold: −2.1): 2.77 | | | |
| | possible cleavage site: between 17 and 18 | | | |
| | >>> Seems to have a cleavable signal peptide (1 to 17) | | | |
| | ALOM: Klein et al's method for TM region allocation | | | |
| | Init position for calculation: 18 | | | |
| | Tentative number of TMS(s) for the threshold 0.5: 1 | | | |
| | Number of TMS(s) for threshold 0.5: 0 | | | |
| | PERIPHERAL Likelihood = 12.15 (at 45) | | | |
| | ALOM score: −1.86 (number of TMSs: 0) | | | |
| | MTOP: Prediction of membrane topology (Hartmann et al.) | | | |
| | Center position for calculation: 8 | | | |
| | Charge difference: −3.0 C(1.0)-N(4.0) | | | |
| | N >= C: N-terminal side will be inside | | | |
| | MITDISC: discrimination of mitochondrial targeting seq | | | |
| | R content: | 4 | Hyd Moment(75): | 12.20 |
| | Hyd Moment(95): | 7.10 | G content: | 1 |
| | D/E content: | 1 | S/T content: | 0 |

```
Score: −0.86
Gavel: prediction of cleavage sites for mitochondrial preseq
R-10 motif at 54 RRL FS
NUCDISC: discrimination of nuclear localization signals
pat4: none
pat7: PGGRTRR (3) at 151
bipartite: none
content of basic residues: 18.8%
NLS Score: −0.22
KDEL: ER retention motif in the C-terminus: none
ER Membrane Retention Signals:
XXRR-like motif in the N-terminus: RRRL
none
SKL: peroxisomal targeting signal in the C-terminus: none
PTS2: 2nd peroxisomal targeting signal: none
VAC: possible vacuolar targeting motif: none
RNA-binding motif: none
Actinin-type actin-binding motif:
type 1: none
type 2: none
NMYR: N-myristoylation pattern: none
Prenylation motif: none
memYQRL: transport motif from cell surface to Golgi: none
Tyrosines in the tail: none
Dileucine motif in the tail: none
checking 63 PROSITE DNA binding motifs: none
checking 71 PROSITE ribosomal protein motifs: none
checking 33 PROSITE prokaryotic DNA binding motifs: none
NNCN: Reinhardt's method for Cytoplasmic/Nuclear discrimination
Prediction: cytoplasmic
Reliability: 89
COIL: Lupas's algorithm to detect coiled-coil regions
total: 0 residues
Final Results (k = 9/23):
47.8%: mitochondrial
17.4%: endoplasmic reticulum
  8.7%: extracellular, including cell wall
  8.7%: Golgi
  8.7%: cytoplasmic
  4.3%: vacuolar
  4.3%: nuclear
>> prediction for CG54455-03 is mit (k = 23)
```

[0327] A search of the NOV4a protein against the Geneseq database, a proprietary database that contains sequences published in patents and patent publication, yielded several homologous proteins shown in Table 4D.

TABLE 4D
Geneseq Results for NOV4a

| | | | Identities/ | |
|---|---|---|---|---|
| | | | Similarities for | |
| Geneseq | Protein/Organism/Length | NOV4a Residues/ | the Matched | Expect |
| Identifier | [Patent #, Date] | Match Residues | Region | Value |
| AAE18804 | Human FGF-like precursor | 1 . . . 170 | 170/170 (100%) | 1e−98 |
| | protein - Homo sapiens, 170 aa. | 1 . . . 170 | 170/170 (100%) | |
| | [US2002001825-A1, 03 JAN. | | | |
| | 2002] | | | |
| ABB75884 | Human FGF homologue zFGF10 - | 1 . . . 170 | 170/170 (100%) | 1e−98 |
| | Homo sapiens, 170 aa. | 1 . . . 170 | 170/170 (100%) | |
| | [US2002031805-A1, 14 MAR. | | | |
| | 2002] | | | |
| ABG34060 | Human Pro peptide #31 - Homo | 1 . . . 170 | 170/170 (100%) | 1e−98 |
| | sapiens, 170 aa. [WO200224888- | 1 . . . 170 | 170/170 (100%) | |
| | A2, 28 MAR. 2002] | | | |
| AAU98086 | Human fibroblast growth factor | 1 . . . 170 | 170/170 (100%) | 1e−98 |
| | FGF-23 protein sequence - Homo | 1 . . . 170 | 170/170 (100%) | |
| | sapiens, 170 aa. [WO200246424- | | | |
| | A2, 13 JUN. 2002] | | | |
| AAB49649 | Human SEC1 protein sequence | 1 . . . 170 | 170/170 (100%) | 1e−98 |
| | SEQ ID 2 - Homo sapiens, 170 aa. | 1 . . . 170 | 170/170 (100%) | |
| | [WO200070046-A2, 23 NOV. | | | |
| | 2000] | | | |

[0328] In a BLAST search of public sequence databases, the NOV4a protein was found to have homology to the proteins shown in the BLASTP data in Table 4E.

TABLE 4E
Public BLASTP Results for NOV4a

| | | | Identities/ | |
|---|---|---|---|---|
| Protein | | | Similarities for | |
| Accession | | NOV4a Residues/ | the Matched | Expect |
| Number | Protein/Organism/Length | Match Residues | Portion | Value |
| Q9HCT0 | Fibroblast growth factor-22 | 1 . . . 170 | 170/170 (100%) | 3e−98 |
| | precursor (FGF-22) - Homo | 1 . . . 170 | 170/170 (100%) | |
| | sapiens (Human), 170 aa. | | | |
| Q8VI79 | Fibroblast growth factor 22 - | 1 . . . 170 | 139/170 (81%) | 3e−76 |
| | Rattus norvegicus (Rat), 162 aa. | 1 . . . 161 | 147/170 (85%) | |
| Q9ESS2 | Fibroblast growth factor-22 | 1 . . . 170 | 138/170 (81%) | 6e−75 |
| | precursor (FGF-22) - Mus | 1 . . . 161 | 146/170 (85%) | |
| | musculus (Mouse), 162 aa. | | | |
| O60371 | R33683_2 - Homo sapiens | 73 . . . 170 | 98/98 (100%) | 8e−52 |
| | (Human), 129 aa. | 32 . . . 129 | 98/98 (100%) | |
| CAD61991 | Sequence 41 from Patent | 25 . . . 169 | 79/145 (54%) | 5e−43 |
| | EP1247530 - Homo sapiens | 28 . . . 172 | 112/145 (76%) | |
| | (Human), 174 aa. | | | |

[0329] PFam analysis predicts that the NOV4a protein contains the domains shown in the Table 4F.

TABLE 4F
Domain Analysis of NOV4a

| | | Identities/ | |
|---|---|---|---|
| | | Similarities | |
| | NOV4a Match | for the | Expect |
| Pfam Domain | Region | Matched Region | Value |
| FGF | 39 . . . 168 | 63/147 (43%) | 1.8e−53 |
| | | 105/147 (71%) | |

### Example 5

[0330] The NOV5 clone was analyzed, and the nucleotide and encoded polypeptide sequences are shown in Table 5A.

TABLE 5A
NOV5 Sequence Analysis

| | | |
|---|---|---|
| NOV5a, CG54611-06 | SEQ ID NO: 139 | 1081 bp |
| DNA Sequence | ORF Start: ATG at 19 | ORF Stop: TAG at 1075 |

GCGCCCTCTCGCGCGGCGATGGCCCCACTCGGATACTTCTTACTCCTCTGCAGCCTGAAGCAGCCTCT
GGGCAGCTACCCGATCTGGTGGTCGCTGGCTGTTGGGCCACAGTATTCCTCCCTGGGCTCGCAGCCCA
TCCTGTGTGCCAGCATCCCGGGCCTGGTCCCCAAGCAGCTCCGCTTCTGCAGGAACTACGTGGAGATC
ATGCCCAGCGTGGCCGAGGGCATCAAGATTGGCATCCAGGAGTGCCAGCACCAGTTCCGCGGCCGCCG
GTGGAACTGCACCACCGTCCACGACAGCCTGGCCATCTTCGGGCCCGTGCTGGACAAAGCTACCAGGG
AGTCGGCCTTTGTCCACGCCATTGCCTCAGCCGGTGTGGCCTTTGCAGTGACACGCTCATGTGCAGAA
GGCACGGCCGCCATCTGTGGCTGCAGCAGCCGCCACCAGGCCTCACCAGGCAAGGCCTGGAAGTGGGG
TGGCTGTAGCGAGGACATCGAGTTTGGTGGGATGGTGTCTCGGGAGTTCGCCGACGCCCGGGAGAACC
GGCCAGATGCCCGCTCAGCCATGAACCGCCACAACAACGAGGCTGGGCGCCAGGCCATCGCCAGCCAC
ATGCACCTCAAGTGCAAGTGCCACGGGCTGTCGGGCAGCTGCGAGGTGAAGACATGCTGGTGGTCGCA
ACCCGACTTCCGCGCCATCGGTGACTTCCTCAAGGACAAGTACGACAGCGCCTCGGAGATGGTGGTGG
AGAAGCACCGGGAGTCCCGCGGCTGGGTGGAGACCCTGCGGCCGCGCTACACCTACTTCAAGGTGCCC
ACGGAGCGCGACCTGGTCTACTACGAGGCCTCGCCCAACTTCTGCGAGCCCAACCCTCAGACGGGCTC
CTTCGGCACGCGCGACCGCACCTGCAACGTCAGCTCGCACGGCATCGACGGCTGCGACCTGCTGTGCT
GCGGCCGCGGCCACAACGCGCGAGCGGAGCGGCGCCGGGAGAAGTGCCGCTGCGTGTTCCACTGGTGC
TGCTACGTCAGCTGCCAGGAGTGCACGCGCGTCTACGACGTGCACACCTGCAAGTAGGCAC

| | | | |
|---|---|---|---|
| NOV5a, CG54611-06 | | | |
| Protein Sequence | SEQ ID NO: 140 | 352 aa | MW at 39364.3 kD |

MAPLGYFLLLCSLKQALGSYPIWWSLAVGPQYSSLGSQPILCASIPGLVPKQLRFCRNYVEIMPSVAE
GIKIGIQECQHQFRGRRWNCTTVHDSLAIFGPVLDKATRESAFVHAIASAGVAFAVTRSCAEGTAAIC
GCSSRHQGSPGKGWKWGGCSEDIEFGGMVSREFADARENRPDARSAMNRHNNEAGRQAIASHMHLKCK
CHGLSGSCEVKTCWWSQPDFRAIGDFLKDKYDSASEMVVEKHRESRGWVETLRPRYTYFKVPTERDLV
YYEASPNFCEPNPETGSFGTRDRTCNVSSHGIDGCDLLCCCRGHNARAERRREKCRCVFHWCCYVSCQ
ECTRVYDVHTCK

| | | |
|---|---|---|
| NOV5b, 283841210 | SEQ ID NO: 141 | 1014 bp |
| DNA Sequence | ORF Start: at 1 | ORF Stop: end of sequence |

GGATCCAGCTACCCGATCTGGTGGTCGCTGGCTGTTGGGCCACAGTATTCCTCCCTGGGCTCGCAGCC
CATCCTGTGTGCCAGCATCCCGGGCCTGGTCCCCAAGCAGCTCCGCTTCTGCAGGAACTACGTGGAGA
TCATGCCCAGCGTGGCCGAGGGCATCAAGATTGGCATCCAGGAGTGCCAGCACCAGTTCCGCGGCCGC
CGGTGGAACTGCACCACCGTCCACCACAGCCTGGCCATCTTCGGGCCCGTGCTGGACAAAGCTACCAG
GGAGTCGGCCTTTGTCCACGCCATTGCCTCAGCCGGTGTGGCCTTTGCAGTGACACGCTCATGTGCAG
AAGGCACGGCCGCCATCTGTGGCTGCAGCAGCCGCCACCAGGGCTCACCAGGCAAGGGCTGGAAGTGG
GGTGGCTGTAGCGAGGACATCGAGTTTGGTGGGATGGTGTCTCGGGAGTTCGCCGACGCCCGGGAGAA
CCGGCCAGATGCCCGCTCAGCCATGAACCGCCACAACAACGAGGCTGGGCGCCAGGCCATCGCCAGCC
ACATGCACCTCAAGTGCAACTGCCACGGGCTGTCGGGCAGCTGCGAGGTGAAGACATGCTGGTGGTCG
CAACCCGACTTCCGCGCCATCGGTGACTTCCTCAAGGACAAGTACGACAGCGCCTCGGAGATGGTGGT
GGAGAAGCACCGGGAGTCCCGCGGCTGGGTGGAGACCCTGCGGCCGCGCTACACCTACTTCAAGGTGC
CCACGGAGCGCGACCTCGTCTACTACGAGGCCTCGCCCAACTTCTGCGAGCCCAACCCTGAGACGGGC
TCCTTCGGCACGCGCGACCGCACCTGCAACGTCAGCTCGCACGGCATCGACGGCTGCGACCTGCTGTG
CTGCGGCCGCGGCCACAACGCGCGAGCGGAGCGGCGCCGGGAGAAGTGCCGCTGCGTGTTCCACTGGT
GCTGCTACGTCAGCTGCCAGGAGTGCACGCGCGTCTACGACGTCCACACCTGCAAGCTCGAG

| | | | |
|---|---|---|---|
| NOV5b, 283841210 | | | |
| Protein Sequence | SEQ ID NO: 142 | 338 aa | MW at 37830.4 kD |

GSSYPIWWSLAVGPQYSSLGSQPILCASIPGLVPKQLRFCRNYVEIMPSVAEGIKIGIQECQHQFRGR
RWNCTTVHDSLAIFGPVLDKATRESAFVHATASAGVAFAVTRSCAEGTAAICGCSSRHQGSPGKGWKW
GGCSEDIEFGGMVSREFADARENRPDARSAMNRHNNEAGRQAIASHMHLKCKCHGLSGSCEVKTCWWS
QPDFRAIGDFLKDKYDSASEMVVEKHRESRGWVETLRPRYTYFKVPTERDLVYYEASPNFCEPNPETG
SFGTRDRTCNVSSHGIDGCDLLCCGRGHNARAERRREKCRCVFHWCCYVSCQECTRVYDVHTCKLE

| | | |
|---|---|---|
| NOV5c,CG54611-01 | SEQ ID NO: 143 | 1116 bp |
| DNA Sequence | ORF Start: ATG at 31 | ORF Stop: TAG at 1087 |

TCCCGGCCCTCCGCGCCCTCTCGCGCGGCGATGGCCCCACTCGGATACTTCTTACTCCTCTGCAGCCT
GAAGCAGGCTCTGGGCAGCTACCCGATCTGGTGGTCGCTGGCTGTTGGCCCACAGTATTCCTCCCTGG
GCTCGCAGCCCATCCTGTGTGCCAGCATCCCGGGCCTGGTCCCCAAGCAGCTCCGCTTCTGCAGGAAC
TACGTGGAGATCATGCCCAGCGTGGCCGAGGGCATCAAGATTGGCATCCAGGAGTGCCAGCACCAGTT
CCGCGGCCGCCGGTGGAACTGCACCACCGTCCACGACAGCCTGGCCATCTTCGGGCCCGTGCTGGACA
AAGCTACCAGGGAGTCGGCCTTTGTCCACGCCATTGCCTCAGCCGGTGTGGCCTTTGCAGTGACACGC
TCATGTGCAGAAGGCACGGCCGCCATCTGTGGCTGCAGCAGCCGCCACCAGCGCTCACCAGGCAAGGG
CTGGAAGTGGGGTGGCTGTAGCGAGGACATCGAGTTTGGTGGGATGGTGTCTCGGGAGTTCGCCGACG
CCCGGGAGAACCGGCCAGATGCCCGCTCAGCCATGAACCGCCACAACAACGAGGCTGGGCGCCAGGCC
ATCGCCAGCCACATGCACCTCAAGTGCAAGTGCCACGGGCTGTCGGGCAGCTGCGAGGTGAAGACATG
CTGGTGGTCGCAACCCGACTTCCGCGCCATCGGTGACTTCCTCAAGGACAAGTACGACAGCGCCTCGG
AGATGGTGGTGGAGAAGCACCGGGAGTCCCGCGGCTGGGTGGAGACCCTGCGGCCGCGCTACACCTAC
TTCAAGGTGCCCACGGAGCGCGACCTGGTCTACTACGAGGCCTCGCCCAACTTCTGCGAGCCCAACCC
TGAGACGGGCTCCTTCGGCACGCGCGACCGCACCTGCAACCTCAGCTCGCACGGCATCGACGGCTGCG
ACCTGCTGTGCTGCGGCCGCGGCCACAACGCGCGAGCGGAGCGGCGCCGGGAGAAGTGCCGCTGCGTG
TTCCACTGGTGCTGCTACGTCAGCTGCCAGGAGTGCACGCGCGTCTACGACGTGCACACCTGCAAGTA
GGCACCGGCCGCGGCTCCCCCTGGACGG

| | | | |
|---|---|---|---|
| NOV5c, CG54611-01 | | | |
| Protein Sequence | SEQ ID NO: 144 | 352 aa | MW at 39364.3 kD |

MAPLGYFLLLCSLKQALGSYPIWWSLAVGPQYSSLGSQPILCASIPGLVPKQLRFCRNYVEIMPSVAE
GIKIGIQECQHQFRGRRWNCTTVHDSLAIFGPVLDKATRESAFVHAIASAGVAFAVTRSCAEGTAAIC
GCSSRHQGSPGKGWKWGGCSEDIEFGGMVSREFADARENRPDARSAMNRHNNEAGRQAIASHMHLKCK
CHGLSGSCEVKTCWWSQPDFRAIGDFLKDKYDSASEMVVEKHRESRGWVETLRPRYTYFKVPTERDLV
YYEASPNFCEPNPETGSFGTRDRTCNVSSHGIDGCDLLCCGRGHNARAERRREKCRCVFHWCCYVSCQ
ECTRVYDVHTCK

| | | |
|---|---|---|
| NOV5d, CG54611-02 | SEQ ID NO: 145 | 1060 bp |
| DNA Sequence | ORF Start: ATG at 2 | ORF Stop: TAG at 1058 |

GATGGCCCCACTCGGATACTTCTTACTCCTCTGCAGCCTGAAGCAGGCTCTGGGCAGCTACCCGATCT
GGTCGTCGCTGGCTGTTGGGCCACAGTATTCCTCCCTGGGCTCGCAGCCCATCCTGTGTGCCAGCATC
CCGGGCCTGGTCCCCAAGCAGCTCCGCTTCTGCAGGAACTACGTGGAGATCATGCCCAGCGTGGCCGA
GGGCATCAAGATTGGCATCCAGGAGTGCCAGCACCAGTTCCGCGGCCGCCGGTGGAACTGCACCACCG
TCCACGACAGCCTGGCCATCTTCGGGCCCGTGCTGGACAAAGCTACCAGGGAGTCGGCCTTTGTCCAC
GCCATTGCCTCAGCCGGTGTGGCCTTTGCAGTGACACGCTCATGTGCAGAAGGCACGGCCGCCATCTG
TGGCTGCAGCAGCCGCCACCAGGGCTCACCAGGCAAGGGCTGGAAGTGGGGTGGCTGTAGCGAGCACA
TCGAGTTTGGTGGGATGGTGTCTCGGGAGTTCGCCGACGCCCGGGAGAACCGGCCAGATCCCCGCTCA
GCCATGAACCGCCACAACAACGAGGCTGGGCGCCAGGCCATCGCCAGCCACATGCACCTCAAGTGCAA
GTGCCACGGGCTGTCGGGCAGCTGCGAGGTGAAGACATGCTGGTGGTCGCAACCCCACTTCCGCGCCA
TCGGTGACTTCCTCAAGGACAAGTACGACAGCCCCTCGGAGATGGTGGTGGAGAAGCACCGGGAGTCC
CGCGGCTGGGTGGAGACCCTGCGGCCGCGCTACACCTACTTCAAGGTGCCCACGGAGCGCGACCTGGT
CTACTACGAGGCCTCGCCCAACTTCTGCGAGCCCAACCCTGAGACGGGCTCCTTCGGCACGCGCGACC
GCACCTGCAACGTCAGCTCGCACGGCATCGACGGCTGCGACCTGCTGTGCTGCGGCCGCGGCCACAAC
GCCCGAGCGGAGCGGCGCCGGGAGAAGTGCCGCTGCGTGTTCCACTGGTGCTGCTACGTCAGCTCCCA
CGAGTGCACGCGCGTCTACGACGTCCACACCTGCAAGTAG

| | | | |
|---|---|---|---|
| NOV5d, CG54611-02 | | | |
| Protein Sequence | SEQ ID NO: 146 | 352 aa | MW at 39364.3 kD |

MAPLCYFLLLCSLKQALGSYPIWWSLAVGPQYSSLGSQPILCASIPGLVPKQLRFCRNYVEIMPSVAE
GIKIGIQECQHQFRGRRWNCTTVHDSLAIFGPVLDKATRESAFVHAIASAGVAFAVTRSCAEGTAAIC
GCSSRHQGSPGKGWKWGGCSEDIEFGGMVSREFADARENRPDARSAMNRHNNEAGRQAIASHMHLKCK
CHGLSGSCEVKTCWWSQPDFRAIGDFLKDKYDSASEMVVEKHRESRCWVETLRPRYTYFKVPTERDLV
YYEASPNFCEPNPETGSFGTRDRTCNVSSHGIDGCDLLCCCRGHNARAERRREKCRCVFHWCCYVSCQ
ECTRVYDVHTCK

| | | |
|---|---|---|
| NOV5e, CG54611-03 | SEQ ID NO: 147 | 1002 bp |
| DNA Sequence | ORF Start: at 1 | ORF Stop: end of sequence |

AGCTACCCCATCTGGTGGTCGCTGGCTGTTGGGCCACAGTATTCCTCCCTGGGCTCGCAGCCCATCCT
GTGTGCCAGCATCCCGGGCCTGGTCCCCAAGCAGCTCCGCTTCTGCAGGAACTACGTGGAGATCATGC
CCAGCGTGGCCGAGGGCATCAAGATTGGCATCCAGGAGTGCCAGCACCAGTTCCGCGGCCGCCGGTGG
AACTGCACCACCGTCCACGACAGCCTGGCCATCTTCGGGCCCGTGCTGGACAAAGCTACCAGGGAGTC
GGCCTTTGTCCACGCCATTGCCTCAGCCGGTGTGGCCTTTGCAGTGACACGCTCATGTCCAGAAGGCA
CGGCCGCCATCTGTCGCTGCAGCAGCCGCCACCAGGGCTCACCAGGCAAGGGCTGGAAGTGGGGTGGC
TGTAGCGAGGACATCGAGTTTGGTGGGATGGTGTCTCGGGAGTTCGCCGACGCCCGGGAGAACCGGTC
AGATGCCCGCTCAGCCATGAACCGCCACAACAACGAGGCTGGGCGCCACGCCATCGCCAGCCACATGC
ACCTCAAGTGCAAGTGCCACGGGCTGTCGGGCAGCTGCGAGGTGAAGACATGCTGGTGGTCGCAACCC
GACTTCCGCGCCATCGGTGACTTCCTCAAGGACAAGTACGACAGCGCCTCGGAGATGGTGGTCGAGAA
GCACCGGGAGTCCCGCGGCTGGGTGGAGACCCTGCGGCCGCGCTACACCTACTTCAAGGTGCCCACGG
AGCGCGACCTGGTCTACTACGAGGCCTCGCCCAACTTCTGCGAGCCCAACCCTCAGACGGGCTCCTTC
GGCACGCGCGACCGCACCTGCAACGTCAGCTCGCACGGCATCGACGGCTGCGACCTGCTGTGCTCCGG
CCGCGGCCACAACGCGCGAGCGGACCGGCGCCGGGAGAAGTGCCGCTGCGTGTTCCACTGGTGCTCCT
ACGTCAGCTGCCAGGAGTGCACGCGCGTCTACGACGTGCACACCTGCAAG

| | | | |
|---|---|---|---|
| NOV5e, CG54611-03 | | | |
| Protein Sequence | SEQ ID NO: 148 | 334 aa | MW at 37433.9 kD |

SYPIWWSLAVGPQYSSLGSQPILCASIPGLVPKQLRFCRNYVEIMPSVAEGIKIGIQECQHQFRGRRW
NCTTVHDSLAIFGPVLDKATRESAFVHAIASAGVAFAVTRSCAEGTAAICGCSSRHQGSPGKGWKWGG
CSEDIEFGGMVSREFADARENRSDARSAMNRHNNEAGRQAIASHMHLKCKCHGLSGSCEVKTCWWSQP
DFRAIGDFLKDKYDSASEMVVEKHRESRGWVETLRPRYTYFKVPTERDLVYYEASPNFCEPNPETGSF
GTRRTCNVSSHGIDGCDLLCCGRGHNARAERRREKCRCVFHWCCYVSCQECTRVYDVHTCK

| | | |
|---|---|---|
| NOV5f, CG54611-04 | SEQ ID NO: 149 | 849 bp |
| DNA Sequence | ORF Start: at 1 | ORF Stop: end of sequence |

AGCTACCCGATCTGGTGGTCGCTGGCTGTTGGGCCACAGTATTCCTCCCTGGGCTCGCAGCCCATCCT
GTGTGCCAGCATCCCGGGCCTGGTCCCCAAGCAGCTCCGCTTCTGCAGGAACTACGTGGAGATCATGC
CCAGCGTGGCCGAGGGCATCAAGATTGGCATCCAGGAGTGCCAGCACCAGTTCCGCGGCCGCCGGTGG
AACTGCACCACCGTCCACGACAGCCTGGGCATCTTCGGGCCCGTGCTGGACAAAGCTACCAGGGAGTC
GGCCTTTGTCCACGCCATTGCCTCAGCCGGTGTGGCCTTTGCAGTGACACGCTCATGTGCAGAAGGCA
CGGCCGCCATCTGTGGCTGCAGCAGCCGCCACCAGGGCTCACCACCCAAGGGCTGGAAGTGGGGTGGC
TGTAGCGAGGACATCCAGTTTGGTGGGATGGTGTCTCGGGAGTTCGCCGACGCCCGCGAGAACCGGCC
AGATGCCCGCTCAGCCATGAACCGCCACAACAACGAGGCTGGGCGCCAGGCCATCGCCAGCCACATGC
ACCTCAAGTGCAAGTGCCACGGGCTGTCGGGCAGCTGCGAGGTGAAGACATCCTGGTGGTCGCAACCC
GACTTCCGCGCCATCGGTGACTTCCTCAAGGACAAGTACGACAGCGCCTCGGAGATGGTGGTGGAGAA
GCACCGGGAGTCCCGCGGCTGGGTGGAGACCCTGCGGCCGCGCTACACCTACTTCAAGGTGCCCACGG
AGCGCGACCTGGTCTACTACGAGGCCTCGCCCAACTTCTGCGAGCCCAACCCTGAGACGGGCTCCTTC
GGCACGCGCGTCTACGACGTGCACACCTGCAAG

| | | | |
|---|---|---|---|
| NOV5f, CG54611-04 | | | |
| Protein Sequence | SEQ ID NO: 150 | 283 aa | MW at 31567.3 kD |

SYPIWWSLAVGPQYSSLGSQPILCASIPGLVPKQLRFCRNYVEIMPSVAEGIKIGIQECQHQFRGRRW
NCTTVHDSLAIFGPVLDKATRESAFVHAIASAGVAFAVTRSCAEGTAAICGCSSRHQGSPGKGWKWGG
CSEDIEFGGMVSREFADARENRPDARSAMNRHNNEAGRQAIASHMHLKCKCHGLSGSCEVKTCWWSQP
DFRAIGDFLKDKYDSASEMVVEKHRESRGWVETLRPRYTYFKVPTERDLVYYEASPNFCEPNPETGSF
GTRVYDVHTCK

| | | |
|---|---|---|
| NOV5g, CG54611-05 | SEQ ID NO: 151 | 1056 bp |
| DNA Sequence | ORF Start: ATG at 1 | ORF Stop: end of sequence |

ATGGCCCCACTCGGATACTTCTTACTCCTCTGCAGCCTGAAGCAGGCTCTGGGCAGCTACCCGATCTG
GTGGTCGCTGGCTGTTGGGCCACAGTATTCCTCCCTCGGCTCGCAGCCCATCCTGTGTGCCAGCATCC
CGGGCCTGGTCCCCAAGCAGCTCCCCTTCTGCAGGAACTACGTGGAGATCATGCCCAGCGTGGCCGAG
GGCATCAAGATTGGCATCCAGGAGTGCCAGCACCAGTTCCGCGGCCGCCGGTGGAACTGCACCACCGT
CCACGACAGCCTGGCCATCTTCGGGCCCGTGCTGGACAAAGCTACCAGGGAGTCGGCCTTTGTCCACG
CCATTGCCTCAGCCGGTGTGGCCTTTGCAGTGACACGCTCATGTCCAGAAGGCACGGCCGCCATCTGT
GGCTGCAGCAGCCGCCACCAGGCCTCACCAGGCAAGGGCTGGAAGTGGGGTGGCTGTAGCGAGGACAT
CGAGTTTGGTCGGATGGTGTCTCGGGAGTTCGCCGACGCCCGGGAGAACCGGCCAGATGCCCGCTCAG
CCATGAACCGCCACAACAACGAGGCTGGGCGCCAGGCCATCGCCAGCCACATGCACCTCAAGTGCAAG
TGCCACGGGCTGTCGGGCAGCTGCGAGGTGAAGACATGCTGGTGGTCGCAACCCGACTTCCGCGCCAT
CGGTGACTTCCTCAAGGACAAGTACGACAGCGCCTCGGAGATGGTGGTGGAGAAGCACCGGGAGTCCC
GCGGCTGGGTGGAGACCCTGCGGCCGCGCTACACCTACTTCAAGGTGCCCACGGAGCGCGACCTGGTC
TACTACGAGGCCTCGCCCAACTTCTGCGAGCCCAACCCTGAGACGGGCTCCTTCGGCACGCGCGACCG
CACCTGCAACGTCAGCTCGCACGGCATCGACGGCTGCGACCTCCTGTGCTGCGGCCGCGCCCACAACG
CGCGAGCGGAGCGCCGCCGGGAGAAGTGCCGCTGCGTGTTCCACTGGTGCTGCTACGTCAGCTGCCAG
GAGTGCACGCGCGTCTACGACGTGCACACCTGCAAG

| | | | |
|---|---|---|---|
| NOV5g, CG54611-05 | | | |
| Protein Sequence | SEQ ID NO: 152 | 352 aa | MW at 39364.3 kD |

MAPLGYFLLLCSLKQALGSYPIWWSLAVGPQYSSLGSQPILCASIPGLVPKQLRFCRNYVEIMPSVAE
GIKIGIQECQHQFRGRRWNCTTVHDSLAIFGPVLDKATRESAFVHAIASAGVAFAVTRSCAEGTAAIC
GCSSRHQGSPGKGWKWGGCSEDIEFGGMVSREFADARENRPDARSAMNRHNNEAGRQAIASHMHLKCK
CHGLSGSCEVKTCWWSQPDFRAICDFLKDKYDSASEMVVEKHRESRGWVETLRPRYTYFKVPTERDLV
YYEASPNFCEPNPETCSFGTRDRTCNVSSHGIDGCDLLCCGRGHNARAERRREKCRCVFHWCCYVSCQ
ECTRVYDVHTCK

| | | |
|---|---|---|
| NOV5h,CG54611-07 | SEQ ID NO: 153 | 1099 bp |
| DNA Sequence | ORF Start: at 2 | ORF Stop: TGA at 1088 |

CACCGGATCCACCATGGCCCCACTCGGCTACTTCTTACTCCTCTGCAGCCTGAAGCAGGCTCTGGGCA
GCTACCCGATCTGGTGCTCGCTGGCTGTTGGGCCACAGTATTCCTCCCTGGGCTCGCAGCCCATCCTC
TGTGCCAGCATCCCTGGCCTGGTCCCCAAGCAGCTCCGCTTCTGCAGGAACTACGTGGAGATCATGCC
CAGCGTGGCCGAGGGCATCAAGATTGGCATCCAGGAGTGCCAGCACCAGTTCCGCGGCCGCCGGTGCA
ACTGCACCACCCTCCACGACAGCCTGGCCATCTTCGCGCCCGTGCTGGACAAAGCTACCAGGGAGTCG
GCCTTTGTCCACGCCATTGCCTCAGCCGGTGTGGCCTTTGCAGTGACACGCTCATCTGCAGAAGGCAC
GGCCGCCATCTGTGGCTGCAGCAGCCGCCACCAGGGCTCACCAGGCAAGGCCTGGAAGTGGGGTGGCT
GTAGCGAGGACATCGAGTTTGGTGGGATGGTGTCTCGGGAGTTCGCCGACGCCCGGCAGAACCGGCCA
GATGCCCGCTCAGCCATGAACCGCCACAACAACGAGGCTGGGCGCCAGGCCATCGCCAGCCACATGCA
CCTCAACTGCAAGTGCCACGGGCTGTCGGGCAGCTGCGAGGTGAAGACATGCTGGTGGTCGCAACCCG
ACTTCCGCGCCATCGGTGACTTCCTCAAGGACAAGTACGACAGCGCCTCGGAGATGGTGGTGGAGAAC
CACCGGGAGTCCCGCGGCTGGGTGGAGACCCTGCGGCCGCGCTACACCTACTTCAAGGTGCCCACGGA
GCGCGACCTGGTCTACTACGAGGCCTCGCCCAACTTCTGCGAGCCCAACCCTGAGACGGGCTCCTTCG
GCACGCGCGACCGCACCTGCAACGTCAGCTCGCACGGCATCGACGGCTGCGACCTGCTGTGCTGCGGC
CGCGCCCACAACGCGCGAGCGGAGCGGCGCCGGGAGAAGTGCCGCTGCGTGTTCCACTGGTGCTGCTA
CGTCAGCTGCCAGGAGTGCACGCGCGTCTACGACGTGCACACCTGCAAGCACCATCACCACCATCACT
GACTCGAGCGG

| | | | |
|---|---|---|---|
| NOV5h, CG54611-07 | | | |
| Protein Sequence | SEQ ID NO: 154 | 362 aa | MW at 40533.5 kD |

TGSTMAPLGYFLLLCSLKQALGSYPTNWSLAVGPQYSSLGSQPILCASTPGLVPKQLRFCRNYVEIMP
SVAEGIKIGIQECQHQFRGRRWNCTTVHDSLAIFGPVLDKATRESAFVHAIASAGVAFAVTRSCAEGT
AAICGCSSRHQGSPGKGWKWGGCSEDIEFGGMVSREFADARENRPDARSAMNRHNNEAGRQAIASHMH
LKCKCHGLSGSCEVKTCWWSQPDFRAIGDFLKDKYDSASEMVVEKHRESRGWVETLRPRYTYFKVPTE
RDLVYYEASPNFCEPNPETGSFGTRDRTCNVSSHGIDGCDLLCCGRGHNARAERRREKCRCVFHWCCY
VSCQECTRVYDVHTCKHHHHHH

| | | |
|---|---|---|
| NOV5i, CG54611-08 | SEQ ID NO: 155 | 1071 bp |
| DNA Sequence | ORF Start: ATG at 10 | ORF Stop: at 1066 |

GGATCCACCATGGCCCCACTCGGATACTTCTTACTCCTCTGCAGCCTGAAGCAGGCTCTGGGCAGCTA
CCCGATCTGGTGGTCGCTGGCTGTTGGGCCACAGTATTCCTCCCTGGGCTCGCAGCCCATCCTGTGTG
CCAGCATCCCGGGCCTGGTCCCCAAGCAGCTCCGCTTCTGCAGGAACTACGTGGAGATCATGCCCAGC
GTGGCCGAGCGCATCAAGATTGGCATCCAGGAGTGCCAGCACCAGTTCCGCGGCCCCCGGTGGAACTG
CACCACCGTCCACGACAGCCTGGCCATCTTCGGGCCCGTGCTGGACAAAGCTACCAGGGAGTCGGCCT
TTGTCCACGCCATTGCCTCAGCCGGTGTGGCCTTTGCAGTGACACGCTCATGTGCAGAAGGCACGGCC
GCCATCTGTGGCTGCAGCAGCCGCCACCAGGGCTCACCAGGCAAGGGCTGGAAGTGGGGTGGCTGTAG
CGAGGACATCCAGTTTGGTGGGATGGTGTCTCGGGAGTTCGCCGACGCCCGGGAGAACCGGCCAGATG
CCCGCTCAGCCATGAACCGCCACAACAACGAGGCTGGGCGCCAGGCCATCGCCAGCCACATGCACCTC
AAGTGCAAGTGCCACGGGCTGTCGGGCAGCTGCGAGGTGAAGACATGCTGGTGGTCGCAACCCGACTT
CCGCGCCATCGGTGACTTCCTCAAGGACAAGTACGACAGCGCCTCGGAGATGGTGGTGGAGAAGCACC
GGGAGTCCCGCGGCTGGGTGGAGACCCTGCGGCCGCGCTACACCTACTTCAAGGTGCCCACGGAGCGC
GACCTGGTCTACTACGAGGCCTCGCCCAACTTCTGCGAGCCCAACCCTGAGACGGGCTCCTTCGGCAC
GCGCGACCGCACCTGCAACGTCAGCTCGCACGGCATCGACGGCTGCGACCTGCTGTGCTGCGGCCGCG
GCCACAACGCGCGAGCGGAGCGCCGCCGGGAGAAGTGCCGCTGCGTGTTCCACTGGTGCTGCTACGTC
AGCTGCCAGGAGTGCACGCGCGTCTACGACGTGCACACCTGCAAGCTCGAG

| | | | |
|---|---|---|---|
| NOV5i, CG54611-08 | | | |
| Protein Sequence | SEQ ID NO: 156 | 352 aa | MW at 39364.3 kD |

MAPLGYFLLLCSLKQALGSYPIWWSLAVGPQYSSLGSQPTLCASIPGLVPKQLRFCRNYVEIMPSVAE
GIKIGIQECQHQFRGRRWNCTTVHDSLAIFGPVLDKATRESAFVHAIASAGVAFAVTRSCAEGTAAIC
GCSSRHQGSPGKGWKWGGCSEDIEFGGMVSREFADARENRPDARSAMNRHNNEAGRQAIASHMHLKCK
CHGLSGSCEVKTCWWSQPDFRAIGDFLKDKYDSASEMVVEKHRESRGWVETLRPRYTYFKVPTERDLV
YYEASPNFCEPNPETGSFGTRDRTCNVSSHGIDGCDLLCCGRGHNARAERRREKCRCVFHWCCYVSCQ
ECTRVYDVHTCK

| | | |
|---|---|---|
| NOV5j, CG54611-09 | SEQ ID NO: 157 | 2932 bp |
| DNA Sequence | ORF Start: ATG at 79 | ORF Stop: TAG at 1135 |

AGCTCCCAGGGCCCGGCCCCCCCCGGCGCTCACGCTCTCGGGGCCGACTCCCGGCCCTCCCCGCCCTC
CCGCGCGGCGATGGCCCCACTCGCATACTTCTTACTCCTCTGCAGCCTGAAGCAGCCTCTGGGCAGCT
ACCCCATCTGGTGGTCGCTGGCTGTTGGGCCACAGTATTCCTCCCTGGGCTCGCAGCCCATCCTGTGT
GCCAGCATCCCGGGCCTGGTCCCCAAGCAGCTCCGCTTCTGCAGGAACTACGTGGAGATCATGCCCAG
CGTGGCCGAGGGCATCAAGATTGGCATCCAGGAGTGCCAGCACCAGTTCCGCGGCCGCCGGTGGAACT
GCACCACCGTCCACGACAGCCTGGCCATCTTCGGGCCCGTGCTGGACAAAGCTACCAGGGAGTCGGCC
TTTGTCCACGCGATTGCCTCAGCCGGTGTGGCCTTTGCAGTGACACGCTCATGTCCAGAAGGCACGGC
CGCCATCTGTGGCTGCAGCACCCGCCACCAGGGCTCACCAGGCAAGGGCTGGAAGTGGGGTGGCTGTA
GCGAGGACATCGAGTTTGGTGGGATGGTGTCTCGGGAGTTCGCCCACGCCCGGGAGAACCGGCCAGAT
GCCCGCTCAGCCATGAACCGCCACAACAACGAGGCTGGGCGCCAGGCCATCGCCAGCCACATGCACCT
CAAGTGCAAGTGCCACGGGCTGTCGCGCAGCTGCGAGGTGAAGACATGCTGGTGGTCGCAACCCGACT
TCCGCGCCATCGGTGACTTCCTCAAGGACAAGTACGACAGCGCCTCGGAGATGGTGGTGGAGAAGCAC
CGGGAGTCCCGCGGCTGGGTGGAGACCCTGCGGCCGCGCTACACCTACTTCAAGGTGCCCACGGAGCG
CGACCTGGTCTACTACGAGGCCTCGCCCAACTTCTGCGAGCCCAACCCTGAGACGGGCTCCTTCGGCA
CGCGCGACCGCACCTGCAACGTCAGCTCGCACGGCATCGACGGCTGCGACCTGCTGTGCTGCGGCCGC
GGCCACAACGCGCGAGCGGAGCGGCGCCGGGAGAAGTGCCGCTGCGTGTTCCACTGGTGCTGCTACGT
CAGCTGCCAGGAGTGCACGCGCGTCTACGACGTGCACACCTGCAAGTAGGCACCGGCCGCGGCTCCCC
CTGGACGGGGCGGGCCCTGCCTGAGGGTGGGCTTTTCCCTGGGTGGAGCAGGACTCCCACCTAAACGG
GGCAGTACTCCTCCCTGGGGGCGGGACTCCTCCCTGGGGGTGGGGCTCCTACCTGGGGGCACAACTCC
TACCTGAAGGCAGGGCTCCTCCCTGGAGCCAGTGTCTCCTCTCTGGTGGCTCGGCTGCTCCTGAATGA
GGCGGAGCTCCAGGATGGGGAGGCGCTCTGCGTTGGCTTCTCCCTGGGGACGGGGCTCCCCTCGACAG
AGGCGGGGCTACAGATTCGGCGGGGCTTCTCTTGGGTGGGACAGGGCTTCTCCTGCGGGGGCGAGGCC
CCTCCCAGTAAGGGCGTCGCTCTGGGTGGGCGGGGCACTAGGTAGGCTTCTACCTGCAGGCCGGGCTC
CTCCTGAAGGAGGCGGGGCTCTAGGATGGGGCACGGCTCTGGGGTAGGCTGCTCCCTGAGGGCGGAGC
GCCTCCTTAGGAGTGGCGTTTTATGGTGGATGAGGCTTCTTCCTGGATGGCGCAGAGCTTCTCCTGAC
CAGGGCAAGGCCCCTTCCACGGGGGCTGTGGCTCTGGGTGGGCGTGGCCTGCATAGGCTCCTTCCTGT
GGGTGGGGCTTCTCTGGGACCAGGCTCCAATGGGGCGGGGCTTCTCTCCGCGGGTGCGACTCTTCCCT
GGGAACCGCCCTCCTGATTAAGGCGTGGCTTCTCCAGGAATCCCGGCTCCAGAGCAGGAAATTCAGCG
CACCAGCCACCTCATCCCCAACCCCCTGTAACGTTCCATCCACCCCTGCGTCGAGCTGGGAAGGTTCG
ATGAAGCGAGTCGGGTCCCCAACCCGTGCCCCTGGGATCCGAGGGCCCCTCTCCAAGCGCCTGGCTTT
GGAATGCTCCAGCCGCGCCGACGCCTGTGCCACCCCTTCCTCAGCCTGGGGTTTGACCACCCACCTGA
CCAGGGGCCCTACCTGGGGAAAGCCTGAAGGGCCTCCCAGCCCCCAACCCCAAGACCAAGCTTACTCC
TGGGAGAGGACAGGGACTTCGCAGAGGCAAGCGACCGAGGCCCTCCCAAAGAGGCCCGCCCTGCCCGG
GCTCCCACACCGTCAGGTACTCCTGCCAGGGAACTGGCCTGCTGCGCCCCAGGCCCCGCCCGTCTCTG
CTCTGCTCAGCTGCGCCCCCTTCTTTGCAGCTGCCCAGCCCCTCCTCCCTGCCCTCGGGTCTCCCCAC
CTGCACTCCATCCAGCTACAGGAGAGATAGAAGCCTCTCGTCCCGTCCCTCCCTTTCCTCCGCCTGTC
CACAGCCCCTTAAGGGAAAGGTAGGAAGAGAGGTCCAGCCCCCCAGGCTGCCCAGAGCTGCTGGTCTC
ATTTGGGGGCGTTCGGGAGGTTTGGGGGGCATCAACCCCCCGACTGTGCTGCTCGCGAAGGTCCCACA
GCCCTGAGATCGGCCGGCCCCCTTCCTGGCCCCTCATGGCGCGACTGCAGAAATGGTCCGCTTTCCTG
GAGCCAATGGCCCGGCCCCTCCTGACTCATCCGCCTGGCCCGGGAATGAATGGGGAGGCCGCTGAACC
CACCCGGCCCATATCCCTGGTTGCCTCATGGCCAGCGCCCCTCAGCCTCTGCCACTGTGAACCGGCTC
CCACCCTCAAGGTGCGGGGAGAAGAAGCGGCCAGGCGGGGCGCCCCAAGAGCCCAAAAGAGGGCACAC
CGCCATCCTCTGCCTCAAATTCTGCGTTTTTGGTTTTAATGTTATATCTGATGCTGCTATATCCACTG
TCCAACGG

| | | | |
|---|---|---|---|
| NOV5j, CG54611-09 | | | |
| Protein Sequence | SEQ ID NO: 158 | 352 aa | MW at 39364.3 kD |

MAPLGYFLLLCSLKQALGSYPIWWSLAVGPQYSSLGSQPILCASIPGLVPKQLRFCRNYVEIMPSVAE
GIKIGIQECQHQFRGRRWNCTTVHDSLAIFGPVLDKATRESAFVHAIASACVAFAVTRSCAEGTAAIC
GCSSRHQGSPGKGWKWGGCSEDIEFGGMVSREFADARENRPDARSAMNRHNNEAGRQAIASHMHLKCK
CHGLSGSCEVKTCWWSQPDFRAIGDFLKDKYDSASEMVVEKHRESRGWVETLRPRYTYFKVPTERDLV
YYEASPNFCEPNPETGSFGTRDRTCNVSSHGIDGCDLLCCGRGHNARAERRREKCRCVFHWCCYVSCQ
ECTRVYDVHTCK

| | | |
|---|---|---|
| NOV5k, CG54611-10 | SEQ ID NO: 159 | 1014 bp |
| DNA Sequence | ORF Start: at 7 | ORF Stop: at 1009 |

GGATCCAGCTACCCGATCTGGTGGTCGCTGGCTGTTGGGCCACAGTATTCCTCCCTGGGCTCGCAGCC
CATCCTGTGTGCCAGCATCCCGGGCCTGGTCCCCAAGCAGCTCCGCTTCTGCAGGAACTACGTGGAGA
TCATGCCCACCGTGGCCGAGGGCATCAAGATTGGCATCCAGGAGTGCCAGCACCAGTTCCGCGGCCGC
CGGTGGAACTGCACCACCGTCCACGACAGCCTGGCCATCTTCGGCCCCGTGCTGGACAAAGCTACCAG
GGAGTCGGCCTTTGTCCACGCCATTGCCTCAGCCGGTGTGGCCTTTGCAGTGACACGCTCATGTGCAG
AAGGCACGGCCGCCATCTGTGGCTGCAGCAGCCGCCACCAGGGCTCACCAGGCAAGGGCTGGAAGTGG
GGTGGCTGTAGCGAGGACATCGAGTTTGGTGGGATGGTGTCTCGCGAGTTCGCCGACGCCCGGGAGAA
CCGGCCAGATGCCCGCTCAGCCATGAACCGCCACAACAACGAGGCTGGGCGCCAGGCCATCGCCAGCC
ACATGCACCTCAAGTGCAAGTGCCACGGCCTGTCGGGCAGCTGCGAGGTGAAGACATGCTGGTGGTCG
CAACCCGACTTCCGCGCCATCGGTGACTTCCTCAAGGACAAGTACGACAGCGCCTCCGAGATGGTGGT
GGAGAAGCACCGGGAGTCCCGCGGCTGGGTGGAGACCCTGCGGCCGCGCTACACCTACTTCAAGGTGC
CCACGGAGCGCGACCTGGTCTACTACGAGGCCTCGCCCAACTTCTGCGAGCCCAACCCTGAGACGGGC
TCCTTCGGCACGCGCGACCGCACCTGCAACGTCAGCTCGCACGGCATCGACGGCTGCGACCTGCTGTG
CTGCGGCCGCGGCCACAACGCGCGAGCGGAGCGGCGCCCGGAGAAGTGCCCCTGCGTGTTCCACTGGT
GCTGCTACGTCAGCTGCCAGGAGTGCACGCGCGTCTACCACGTGCACACCTGCAAGCTCGAG

| | | | |
|---|---|---|---|
| NOV5k, CG54611-10 | | | |
| Protein Sequence | SEQ ID NO: 160 | 334 aa | MW at 37444.0 kD |

SYPIWWSLAVGPQYSSLGSQPILCASIPGLVPKQLRFCRNYVEIMPSVAEGIKIGIQECQHQFRGRRW
NCTTVHDSLAIFGPVLDKATRESAFVHAIASAGVAFAVTRSCAEGTAAICGCSSRHQGSPGKGWKWGG
CSEDIEFGGMVSREFADARENRPDARSAMNRHNNEAGRQAIASHMHLKCKCHGLSGSCEVKTCWWSQP
DFRAIGDFLKDKYDSASEMVVEKHRESRGWVETLRPRYTYFKVPTERDLVYYEASPNFCEPNPETGSF
GTRDRTCNVSSHGIDGCDLLCCGRGHNARAERRREKCRCVFHWCCYVSCQECTRVYDVHTCK

| | | |
|---|---|---|
| NOV5l, CG54611-11 | SEQ ID NO: 161 | 1081 bp |
| DNA Sequence | ORF Start: ATG at 14 | ORF Stop: TAG at 1070 |

CACCGGATCCACCATGGCCCCACTCGGATACTTCTTACTCCTCTGCAGCCTGAAGCAGGCTCTGGGCA
GCTACCCCATCTGGTGGTCGCTGGCTGTTGGGCCACAGTATTCCTCCCTGGGCTCGCAGCCCATCCTG
TGTGCCAGCATCCCGGGCCTGGTCCCCAAGCAGCTCCCCTTCTGCAGGAACTACGTGGAGATCATGCC
CAGCGTGGCCGAGGGCATCAAGATTGGCATCCAGGAGTGCCAGCACCAGTTCCGCGGCCGCCGGTGGA
ACTGCACCACCGTCCACGACAGCCTGGCCATCTTCGGGCCCGTGCTGGACAAAGCTACCAGGGAGTCG
GCCTTTGTCCACGCCATTGCCTCAGCCGGTGTGGCCTTTGCAGTGACACGCTCATGTGCAGAAGGCAC
GGCCGCCATCTGTGGCTGCAGCAGCCGCCACCAGGGCTCACCAGGCAAGGGCTGGAAGTGGGGTGGCT
GTAGCGAGGACATCGAGTTTGGTGGGATGGTGTCTCGGGAGTTCGCCCACGCCCGGGAGAACCGGCCA
GATGCCCGCTCAGCCATGAACCGCGACAACAACGAGGCTGGGCGCCAGGCCATCCCCAGCCACATGCA
CCTCAAGTGCAAGTGCCACGGGCTGTCGGGCAGCTGCGAGGTGAAGACATGCTGGTGGTCGCAACCCG
ACTTCCGCGCCATCGGTGACTTCCTCAAGGACAAGTACGACAGCGCCTCGGAGATGGTGGTGGAGAAG
CACCGGGAGTCCCGCGGCTGGGTGGAGACCCTGCGGCCGCGCTACACCTACTTCAAGGTGCCCACGGA
GCGCGACCTGGTCTACTACGAGGCCTCGCCCAACTTCTGCGAGCCCAACCCTGAGACGGGCTCCTTCG
GCACGCGCCACCGCACCTGCAACGTCAGCTCGCACGGCATCGACGCCTGCGATCTGCTGTGCTGCGGC
CGCGGCCACAACGCGCGAGCGGAGCGGCGCCGGGAGAAGTGCCGGTGCGTGTTCCACTGGTGCTGCTA
CGTCAGCTGCCAGGAGTGCACGCGCGTCTACGACGTGCACACCTGCAAGTAGCTCGAGGGC

| | | | |
|---|---|---|---|
| NOV5l, CG54611-11 | | | |
| Protein Sequence | SEQ ID NO: 162 | 352 aa | MW at 39364.3 kD |

MAPLGYFLLLCSLKQALGSYPIWWSLAVGPQYSSLGSQPILCASIPGLVPKQLRFCRNYVEIMPSVAE
GIKIGIQECQHQFRGRRWNCTTVHDSLAIFGPVLDKATRESAFVHAIASAGVAFAVTRSCAEGTAAIC
GCSSRHQGSPGKGWKWGGCSEDIEFGGMVSREFADARENRPDARSAMNRHNNEAGRQAIASHMHLKCK
CHGLSGSCEVKTCWWSQPDFRAIGDFLKDKYDSASEMVVEKHRESRGWVETLRPRYTYFKVPTERDLV
YYEASPNFCEPNPETGSFGTRDRTCNVSSHGIDGCDLLCCGRGHNARAERRREKCRCVFHWCCYVSCQ
ECTRVYDVHTCK

| | | |
|---|---|---|
| NOV5m, CG54611-12 | SEQ ID NO: 163 | 947 bp |
| DNA Sequence | ORF Start: ATG at 5 | ORF Stop: TAG at 944 |

CTTGATGGCCCCACTCGGATACTTCTTACTCCTCTGCAGCCTGAAGCAGGCTCTGGGCAGCTACCCGA
TCTGGTGGTCGCTGGCTGTTGGCCCACAGTATTCCTCCCTGGGCTCGCAGCCCATCCTGTGTGCCAGC
ATCCCGGGCCTGGTCCCCAAGCAGCTCCGCTTCTGCAGGAACTACGTGGACATCATGCCCAGCGTGGC
CGAGGGCATCAAGATCGGCATCCAGGAGTGCCAGCACCAGTTCCGCGGCCGCCGGTGCAACTGCACCA
CCGTCCACGACAGCCTGGCCATCTTCGGGCCCGTGCTGCACAAAGCTACCAGGGAGTCGGCCTTTGTC
CACGCCATTGCCTCAGCCGGTGTGGCCTTTGCAGTGACACGCTCATCTGCAGAAGGCGCCGCCCCCAT
CTGTGGCTGCAGCAGCCGCCACCAGGGCTCACCAGGCAAGGGCTGGAAGTGGGGTGGCTGTACCGAGG
ACATCGAGTTTGGTGGGATGGTGTCTCGGGAGTTCGCCGACGCCCGGGAGAACCGGCCAGATGTCCGC
TCAGCCATGAACCGCCACAACAACGAGGCTGGGCGCCAGGACAAGTACGACAGCGCCTCGGAGATGGT
GGTGGAGAAGCACCGGGAGTCCCGCGGCTGGGTGGAGACCCTGCGGCCGCGCTACACCTACTTCAAGG
TGGCCACGGAGCGCGACCTGGTCTACTACGAGGCCTCGCCCAACTTCTGCGAGCCCAACCCTGAGACG
GGCTCCTTCGGCACGCGCGACCGCACCTGCAACGTCAGCTCGCACGGCATCGACGGCTGCGACCTGCT
GTGCTGCGGCCGCGGCCACAACGCGCGAGCGGAGCGGCGCCGGGAGAAGTGCCGCTGCGTGTTCCACT
GGTGCTGCTACGTCAGCTGCCAGGAGTGCACGCGCGTCTACGACGTGCACACCTGCAAGTAGG

| | | | |
|---|---|---|---|
| NOV5m, CG54611-12 | | | |
| Protein Sequence | SEQ ID NO: 164 | 313 aa | MW at 34988.3 kD |

MAPLGYFLLLCSLKQALGSYPIWWSLAVGPQYSSLGSQPILCASIPGLVPKQLRFCRNYVEIMPSVAE
GIKIGIQECQHQFRGRRWNCTTVHDSLAIFGPVLDKATRESAFVHAIASAGVAFAVTRSCAEGAAAIC
GCSSRHQGSPGKGWKWGGCSEDIEFGGMVSREFADARENRPDVRSANNRHNNEAGRQDKYDSASEMVV
EKHRESRGWVETLRPRYTYFKVPTERDLVYYEASPNFCEPNPETGSFGTRDRTCNVSSHGIDGCDLLC
CGRGHNARAERRREKCRCVFHWCCYVSCQECTRVYDVHTCK

| | | |
|---|---|---|
| NOV5n,CG54611-13 | SEQ ID NO: 165 | 1194 bp |
| DNA Sequence | ORF Start: ATG at 28 | ORF Stop: TAG at 1165 |

GATGGCCCACTCGGATACTTCTTACTGATGGCCCCACTCGGATACTTCTTACTGATGGCCCCACTCGG
ATACTTCTTACTGATGGCCCCACTCGGATACTTCTTACTGATCGCCCCACTCGGATACTTCTTACTCC
TCTGCAGCCTGAAGCAGGCTCTGGGCAGCTACCCGATCTGGTGGTCGCTGGCTGTTGGGCCACAGTAT
TCCTCCCTGGGCTCGCAGCCCATCCTGTGTGCCAGCATCCCGGGCCTGGTCCCCAAGCAGCTCCGCTT
CTGCAGGAACTACGTGGAGATCATGCCCAGCGTGGCCGAGGGCATCAAGATTGGCATCCACGAGTGCC
AGCACCAGTTCCGCGGCCGCCGGTGGAACTGCACCACCGTCCACGACAGCCTGGCCATCTTCGGGCCC
GTGCTGGACAAAGCTACCAGGGAGTCGGCCTTTGTCCACGCCATTGCCTCAGCCGGTGTGGCCTTTGC
AGTGACACGCTCATGTGCAGAAGGCACGGCCGCCATCTGTGGCTGCAGCAGCCGCCACCAGGGCTCAC
CGGGCAAGGGCTGGAAGTGGGGTGGCTGTAGCGAGGACATCGAGTTTGGTGGGATGGTGTCTCGGGAG
TTCGCCGACGCCCGGGAGAACCGGCCAGATGCCCGCTCAGCCATGAACCGCCACAACAACGAGGCTGG
GCGCCAGGCCATCGCCAGCCACATGCACCTCAAGTGCAAGTGCCACGGGCTGTCGGGCAGCTGCGAGG
TGAAGACATGCTGGTGGTCGCAACCCGACTTCCGCGCCATCGGTGACTTCCTCAAGGACAAGTACGAC
AGCGCCTCGGAGATGGTGGTGGAGAAGCACCGGGAGTCCCGCGGCTGGGTGGAGACCCTGCGGCCGCG
CTACACCTACTTCAAGGTGCCCACGGACCGCGACCTGGTCTACTACGAGGCCTCGCCCAACTTCTGCG
AGCCCAACCCTGAGACGGGCTCTTTCGGCACGCGCGACCGCACCTGCAACGTCAGCTCGCACGGCATC
GACGGCTGCGACCTGCTGTGCTGCGGCCGCGGCCACAACGCGCGAGCGGAGCGGCGCCGGGAGAAGTG
CCGCTGCGTGTTCCACTGGTGCTGCTACGTCAGCTGCCAGGAGTGCACGCGCGTCTACGACGTGCACA
CCTGCAAGTAGGCACGTGCACACCTGCAAGTAGGCATC

| | | | |
|---|---|---|---|
| NOV5n, CG54611-13 | | | |
| Protein Sequence | SEQ ID NO: 166 | 379 aa | MW at 42383.1 kD |

MAPLGYFLLMAPLGYFLLMAPLGYFLLMAPLGYFLLLCSLKQALGSYPIWWSLAVCPQYSSLGSQPIL
CASIPGLVPKQLRFCRNYVEIMPSVAEGIKIGIQECQHQFRGRRWNCTTVHDSLAIFGPVLDKATRES
AFVHAIASAGVAFAVTRSCAEGTAAICGCSSRHQGSPGKGWKWGGCSEDIEFGGMVSREFADARENRP
DARSAMNRHNNEAGRQAIASHMHLKCKCHGLSGSCEVKTCWWSQPDFRAIGDFLKDKYDSASEMVVEK
HRESRGWVETLRPRYTYFKVPTERDLVYYEASPNFCEPNPETGSFGTRDRTCNVSSHGIDGCDLLCCG
RGHNARAERRREKCRCVFHWCCYVSCQECTRVYDVHTCK

| | | |
|---|---|---|
| NOV5o, CG54611-14 | SEQ ID NO: 167 | 1082 bp |
| DNA Sequence | ORF Start: ATG at 16 | ORF Stop: TAG at 1072 |

CCCTCTCGCGCGGCGATGGCCCCACTCGGATACTTCTTACTCCTCTGCAGCCTGAAGCAGGCTCTGGG
CAGCTACCCGATCTGGTGGTCGCTGGCTGTTGGGCCACAGTATTCCTCCCTGGGCTCGCAGCCCATCC
TGTGTGCCAGCATCCCGGGCCTGGTCCCCAAGCAGCTCCGCTTCTGCAGGAACTACGTGGAGATCATG
CCCAGCGTGGCCGAGGGCATCAAGATTGGCATCCAGGAGTGCCAGCACCAGTTCCGCGGCCGCCGGTG
GAACTGCACCACCGTCCACGACAGCCTCGCCATCTTCGGGCCCGTGCTGGACAAAGCTACCAGGGAGT
CGCCCTTTGTCCACGCCATTGCCTCAGCCGGTGTGGCCTTTGCAGTGACACGCTCATGTGCAGAACGC
ACGGCCGCCATCTGTGGCTGCAGCAGCCGCCACCAGGGCTCACCAGGCAAGGGCTGGAAGTGGGGTGG
CTGTAGCGAGGACATCGAGTTTGGTGGGATGGTGTCTCGGGAGTTCGCCGACGCCCGGGAGAACCGGC
CAGATGCCCGCTCAGCCATGAACCGCCACAACAACGAGGCTGGGCGCCAGGCCATCGCCACCCACATG
CACCTCAAGTGCAAGTGCCACGGGCTGTCGGGCAGCTGCGAGGTGAAGACATGCTGGTGGTCGCAACC
CGACTTCCCCGCCATCGGTGACTTCCTCAAGGACAACTACGACACCGCCTCGGACATGGTCGTGCAGA
AGCACCGGGAGTCCCGCGGCTGGGTGGAGACCCTGCGGCCGCGCTACACCTACTTCAAGGTGCCCACG
GAGCGCGACCTGGTCTACTACGAGGCCTCGCCCAACTTCTGCGAGCCCAACCCTGAGACGGGCTCCTT
CGGCACGCGCGACCGCACCTGCAACGTCAGCTCGCACGGCATCGACGGCTGCGACCTGCTGTGCTGCG
GCCGCGGCCACAACGCGCGAGCGGAGCGGCGCCGGGAGAAGTGCCGCTGCGTGTTCCACTGGTGCTGC
TACGTCAGCTGCCAGGAGTGCACGCGCGTCTACGACGTGCACACCTGCAAGTAGGCACCGGC

| | | | |
|---|---|---|---|
| NOV5o, CG54611-14 | | | |
| Protein Sequence | SEQ ID NO: 168 | 352 aa | MW at 39364.3 kD |

MAPLGYFLLLCSLKQALGSYPIWWSLAVGPQYSSLGSQPILCASIPGLVPKQLRFCRNYVEIMPSVAE
GIKIGIQECQHQFRGRRWNCTTVHDSLAIFGPVLDKATRESAFVHAIASAGVAFAVTRSCAEGTAAIC
GCSSRHQGSPGKGWKWGGCSEDIEFGGMVSREFADARENRPDARSANNRHNNEAGRQAIASHMHLKCK
CHGLSGSCEVKTCWWSQPDFRAIGDFLKDKYDSASEMVVEKHRESRGWVETLRPRYTYFKVPTERDLV
YYEASPNFCEPNPETGSFGTRDRTCNVSSHGIDGCDLLCCGRGHNARAERRREKCRCVFHWCCYVSCQ
ECTRVYDVHTCK

| | | |
|---|---|---|
| NOV5p, CG54611-15 | SEQ ID NO: 169 | 1076 bp |
| DNA Sequence | ORF Start: ATG at 2 | ORF Stop: TAG at 1058 |

GATGGCCCCACTCGGATACTTCTTACTCCTCTGCAGCCTGAAGCAGGCTCTGGGCAGCTACCCGATCT
GGTGGTCGCTGGCTGTTGGGCCACAGTATTCCTCCCTCGGCTCGCAGCCCATCCTGTGTGCCAGCATC
CCGGGCCTCGTCCCCAAGCAGCTCCGCTTCTGCAGGAACTACGTGGAGATCATGCCCAGCGTGGCCGA
GGGCATCAACATTGGCATCCAGGAGTGCCAGCACCAGTTCCGCGGCCGCCGGTGGAACTGCACCACCG
TCCACGACACCCTGGCCATCTTCGGGCCCGTGCTGGACAAAGCTACCAGGGAGTCGGCCTTTGTCCAC
GCCATTGCCTCAGCCGGTGTGGCCTTTGCAGTGACACGCTCATGTGCAGAACGCACGGCCGCCATCTG
TGGCTGCAGCAGCCGCCACCAGGGCTCACCAGGCAAGGGCTGGAAGTGGGGTGGCTGTAGCGAGGACA
TCGAGTTTGGTGGGATGGTGTCTCGGGAGTTCGCCGACGCCCGGGAGAACCGGCCAGATGCCCGCTCA
GCCATGAACCGCCACAACAACGAGGCTGGGCGCCAGGCCATCGCCAGCCACATGCACCTCAAGTGCAA
GTGCCACGGGCTGTCGGGCAGCTGCGAGGTGAAGACATGCTGGTGGTCGCAACCCGACTTCCGCGCCA
TCGGTGACTTCCTCAAGGACAAGTACGACAGCGCCTCGGAGATGGTGGTGGAGAAGCACCGGGAGTCC
CGCGGCTGGGTGGAGACCCTGCGGCCGCGCTACACCTACTTCAAGGTGCCCACGGAGCGCGACCTGGT
CTACTACGAGGCCTCGCCCAACTTCTGCGAGCCCAACCCTGAGACGGGCTCCTTCGGCACGCGCGACC
GCACCTGCAACGTCAGCTCGCACGGCATCGACGGCTGCGACCTGCTGTGCTGCGGCCGCGGCCACAAC
GCGCGAGCGGAGCGGCGCCGGGAGAAGTGCCGCTGCGTGTTCCACTGGTGCTGCTACGTCAGCTGCCA
GGAGTGCACCCGCGTCTACGACGTGCACACCTGCAAGTAGAAGGGCGAATTCCGCC

| | | | |
|---|---|---|---|
| NOV5p, CG54611-15 | | | |
| Protein Sequence | SEQ ID NO: 170 | 352 aa | MW at 39364.3 kD |

MAPLGYFLLLCSLKQALGSYPIWWSLAVGPQYSSLGSQPILCASIPGLVPKQLRFCRNYVEIMPSVAE
GIKIGIQECQHQFRGRRWNCTTVHDSLAIFGPVLDKATRESAFVHAIASAGVAFAVTRSCAEGTAAIC
GCSSRHQGSPGKGWKWGGCSEDTEFGGMVSREFADARENRPDARSAMNRHNNEAGRQAIASHMHLKCK
CHGLSGSCEVKTCWWSQPDFRATGDFLKDKYDSASEMVVEKHRESRGWVETLRPRYTYFKVPTERDLV
YYEASPNFCEPNPETGSFGTRDRTCNVSSHGIDGCDLLCCGRGHNAPAERRREKCRCVFHWCCYVSCQ
ECTRVYDVHTCK

| | | |
|---|---|---|
| NOV5q, CG54611-16 | SEQ ID NO: 171 | 1194 bp |
| DNA Sequence | ORF Start: ATG at 28 | ORF Stop: TAG at 1165 |

GATGGCCCACTCGGATACTTCTTACTGATGGCCCCACTCGGATACTTCTTACTGATGGCCCCACTCGG
ATACTTCTTACTGATGGCCCCACTCGGATACTTCTTACTGATGGCCCCACTGGGATACTTCTTACTCC
TCTGCAGCCTGAAGCAGGCTCTGGGCAGCTACCCGATCTGGTGGTCGCTGGCTGTTGGGCCACAGTAT
TCCTCCCTGGGCTCGCAGCCCATCCTGTGTGCCAGCATCCCGGGCCTGGTCCCCAAGCAGCTCCGCTT
CTGCAGGAACTACGTGGAGATCATGCCCAGCGTGGCCGAGGGCATCAAGATTGGCATCCAGGAGTGCC
AGCACCAGTTCCGCGGCCGCCGGTGGAACTGCACCACCGTCCACGACAGCCTGGCCATCTTCGGGCCC
GTGCTGGACAAAGCTACCAGGGAGTCGGCCTTTGTCCACGCCATTGCCTCACCCGGTGTGGCCTTTGC
AGTGACACGCTCATGTGCAGAAGGCACGGCCGCCATCTGTGGCTGCAGCAGCCGCCACCAGGGCTCAC
CGGGCAAGGGCTGGAAGTGGGGTGGCTGTAGCGAGGACATCGAGTTTGGTGGGATGGTGTCTCGGGAG
TTCGCCGACCCCCGGGACAACCGGCCAGATGCCCGCTCAGCCATGAACCGCCACAACAACGAGGCTGG
GCGCCAGGCCATCGCCAGCCACATGCACCTCAAGTGCAAGTGCCACGGGCTGTCGGGCAGCTGCGAGC
TGAAGACATGCTGGTGGTCGCAACCCGACTTCCGCGCCATCGGTGACTTCCTCAAGGACAAGTACGAC
AGCGCCTCGGAGATGGTGGTGGAGAAGCACCGGGAGTCCCGCGGCTGGGTGGAGACCCTGCGGCCGCG
CTACACCTACTTCAAGGTGCCCACGGAGCGCGACCTGGTCTACTACCAGGCCTCGCCCAACTTCTGCG
AGCCCAACCCTGAGACGGGCTCTTTCGGCACGCGCGACCGCACCTGCAACGTCAGCTCGCACGGCATC
GACGGCTGCGACCTGCTGTGCTGCGGCCGCGGCCACAACGCGCGAGCGGAGCGGCGCCGGGAGAAGTG
CCGCTGCGTGTTCCACTGGTGCTGCTACGTCAGCTGCCAGGAGTGCACGCGCGTCTACGACGTGCACA
CCTGCAAGTAGGCACGTGCACACCTGCAAGTAGGCATC

| | | | |
|---|---|---|---|
| NOV5q, CG54611-16 | | | |
| Protein Sequence | SEQ ID NO: 172 | 379 aa | MW at 42383.1 kD |

MAPLGYFLLMAPLGYFLLMAPLGYFLLMAPLGYFLLLCSLKQALGSYPIWWSLAVGPQYSSLGSQPIL
CASIPGLVPKQLRFCRNYVEIMPSVAEGIKIGIQECQHQFRGRRWNCTTVHDSLAIFGPVLDKATRES
AFVHAIASAGVAFAVTRSCAEGTAAICGCSSRHQGSPGKGWKWGGCSEDIEFGGMVSREFADARENRP
DARSAMNRHNNEAGRQAIASHMHLKCKCHGLSGSCEVKTCWWSQPDFRAIGDFLKDKYDSASEMVVEK
HRESRGWVETLRPRYTYFKVPTERDLVYYEASPNFCEPNPETGSFGTRDRTCNVSSHGIDGCDLLCCG
RGHNARAERRREKCRCVFHWCCYVSCQECTRVYDVHTCK

| | | |
|---|---|---|
| NOV5r, CG54611-17 | SEQ ID NO: 173 | 1060 bp |
| DNA Sequence | ORF Start: ATG at 2 | ORF Stop: TAG at 1058 |

GATGGCCCCACTCGGATACTTCTTACTCCTCTGCAGCCTGAAGCAGGCTCTGGGCAGCTACCCGATCT
GGTGGTCGCTGGCTGTTGGGCCACAGTATTCCTCCCTGGGCTCGCAGCCCATCCTGTGTGCCAGCATC
CCGGGCCTGGTCCCCAAGCAGCTCCGCTTCTGCAGGAACTACGTGGAGATCATGCCCAGCGTGGCCGA
GGGCATCAAGATTGGCATCCAGGAGTGCCAGCACCAGTTCCGCGGCCGCCGGTGGAACTGCACCACCG
TCCACGACAGCCTGGCCATCTTCGGGCCCGTGCTGGACAAAGCTACCAGGGAGTCGGCCTTTGTCCAC
GCCATTGCCTCAGCCGGTGTGGCCTTTGCAGTGACACGCTCATGTGCAGAAGGCACGGCCGCCATCTG
TGGCTGCAGCAGCCGCCACCAGGGCTCACCAGGCAAGGGCTGGAAGTGGGGTGGCTGTAGCGAGGACA
TCGAGTTTGGTGGGATGGTGTCTCGGGAGTTCGCCGACGCCCGGGAGAACCGGCCAGATGCCCGCTCA
GCCATGAACCGCCACAACAACGAGGCTGGCCGCCAGGCCATCGCCAGCCACATGCACCTCAAGTCCAA
GTGCCACCGGCTGTCGGGCAGCTGCGAGGTGAAGACATGCTGGTGGTCGCAACCCGACTTCCGCGCCA
TCGGTGACTTCCTCAAGGACAAGTACGACAGCGCCTCGGAGATGGTGGTGGAGAAGCACCGGCAGTCC
CGCGGGTGGGTGGAGACCCTGCGGCCGCGCTACACCTACTTCAAGGTGCCCACGGAGCGCGACCTGGT
CTACTACGAGGCCTCGCCCAACTTCTGCGAGCCCAACCCTGAGACGGGCTCCTTCGGCACGCGCGACC
GCACCTGCAACGTCAGCTCGCACGGCATCGACGGCTGCGACCTGCTGTGCTGCGGCCGCGGCCACAAC
GCGCGAGCGGAGCGGCGCCGGGAGAAGTGCCGCTGCGTGTTCCACTGGTGCTGCTACGTCAGCTGCCA
GGAGTGCACGCGCGTCTACGACGTGCACACCTGCAAGTAG

| | | | |
|---|---|---|---|
| NOV5r, CG54611-17 | | | |
| Protein Sequence | SEQ ID NO: 174 | 352 aa | MW at 39364.3 kD |

MAPLGYFLLLCSLKQALGSYPIWWSLAVGPQYSSLGSQPILCASIPGLVPKQLRFCRNYVEIMPSVAE
GIKIGIOECOHOFRGRRWNCTTVHDSLAIFGPVLDKATRESAFVHAIASAGVAFAVTRSCAEGTAAIC
GCSSRHQGSPGKGWKWGGCSEDTEFGGMVSREFADARENRPDARSAMNRHNNEAGRQAIASHNHLKCK
CHGLSGSCEVKTCWWSQPDFRAIGDFLKDKYDSASEMVVEKHRESRGWVETLRPRYTYFKVPTERDLV
YYEASPNFCEPNPETGSFGTRDRTCNVSSHGIDGCDLLCCGRGXNARAERRREKCRCVFHWCCYVSCQ
ECTRVYDVHTCK

| | | |
|---|---|---|
| NOV5s, CG54611-18 | SEQ ID NO: 175 | 1060 bp |
| DNA Sequence | ORF Start: ATG at 2 | ORF Stop: TAG at 1058 |

GATGGCCCCACTCGGATACTTCTTACTCCTCTGCAGCCTGAAGCAGGCTCTGGGCAGCTACCCGATCT
GCTGGTCGCTGGCTGTTGGGCCACAGTATTCCTCCCTGGGCTCGCAGCCCATCCTGTGTGCCAGCATC
CCGGGCCTGGTCCCCAAGCAGCTCCGCTTCTGCAGGAACTACGTGGAGATCATGCCCAGCGTGGCCGA
GGGCATCAAGATTGGCATCCAGGAGTGCCAGCACCAGTTCCGCGGCCGCCGGTGGAACTGCACCACCG
TCCACGACAGCCTGGCCATCTTCGGGCCCGTGCTGGACAAAGCTACCAGGGAGTCGGCCTTTGTCCAC
GCCATTGCCTCAGCCGGTGTGGCCTTTGCAGTGACACGCTCATGTGCAGAAGGCACGGCCGCCATCTG
TGGCTGCAGCAGCCGCCACCAGGGCTCACCAGGCAAGGGCTGGAAGTGGGGTGGCTGTAGCGAGGACA
TCGAGTTTGGTGGGATGGTGTCTCGGGAGTTCGCCGACGCCCGGGAGAACCGGCCAGATGCCCGCTCA
GCCATGAACCGCCACAACAACGAGGCTGGGCGCCAGGCCATCGCCAGCCACATGCACCTCAAGTGCAA
GTGCCACCGGCTGTCGGGCAGCTGCGAGGTGAAGACATGCTGGTGGTCGCAACCCGACTTCCGCGCCA
TCGGTGACTTCCTCAAGGACAAGTACGACAGCGCCTCGGAGATGGTGGTGGAGAAGCACCGGGAGTCC
CGCGGCTGGGTGGAGACCCTGCGGCCGCGCTACACCTACTTCAAGGTGCCCACGGAGCGCGACCTGGT
CTACTACGAGGCCTCGCCCAACTTCTGCGAGCCCAACCCTGAGACGGGCTCCTTCGGCACGCGCGACC
GCACCTGCAACGTCAGCTCGCACGGCATCGACGGCTGCGACCTGCTGTGCTGCGGCCGCGGCCACAAC
GCGCGAGCGGAGCGGCGCCGGGAGAAGTGCCGCTGCGTGTTCCACTGGTGCTGCTACGTCAGCTGCCA
GGAGTGCACGCGCGTCTACGACGTGCACACCTGCAAGTAG

| | | | |
|---|---|---|---|
| NOV5s, CG54611-18 | | | |
| Protein Sequence | SEQ ID NO: 176 | 352 aa | MW at 39364.3 kD |

MAPLGYFLLLCSLKQALGSYPIWWSLAVGPQYSSLGSQPILCASIPGLVPKQLRFCRNYVEIMPSVAE
GIKIGIQECQHQFRGRRWNCTTVHDSLAIFGPVLDKATRESAFVHAIASAGVAFAVTRSCAEGTAAIC
GCSSRHQGSPGKGWKWGGCSEDIEFGGMVSREFADARENRPDARSAMNRHNNEAGRQAIASHMHLKCK
CHGLSGSCEVKTCWWSQPDFRAIGDFLKDKYDSASEMVVEKHRESRGWVETLRPRYTYFKVPTERDLV
YYEASPNFCEPNPETGSFGTRDRTCNVSSHGIDGCDLLCCGRGHNAEAERRREKCRCVFHWCCYVSCQ
ECTRVYDVHTCK

| | | |
|---|---|---|
| | SEQ ID NO: 177 | 1116 bp |
| NOV5t, SNP13378438 of | ORF Start: ATG at 31 | ORF Stop: TAG at 1087 |
| CG54611-01, DNA Sequence | SNP Pos: 149 | SNP Change: T to C |

TCCCGGCCCTCCGCGCCCTCTCGCGCGGCGATGGCCCCACTCGGATACTTCTTACTCCTCTGCAGCCT
GAAGCAGGCTCTGGGCAGCTACCCGATCTGGTGGTCGCTGGCTGTTGGGCCACAGTATTCCTCCCTGG
GCTCGCAGCCCACCCTGTGTGCCAGCATCCCGGGCCTGGTCCCCAAGCAGCTCCGCTTCTGCAGGAAC
TACGTGGAGATCATGCCCAGCGTGGCCGAGGGCATCAAGATTGGCATCCAGGAGTGCCAGCACCAGTT
CCGCGGCCGCCGGTGGAACTGCACCACCGTCCACGACAGCCTGGCCATCTTCGGGCCCGTGCTGGACA
AAGCTACCAGGGAGTCGGCCTTTGTCCACGCCATTGCCTCAGCCGGTGTGGCCTTTGCAGTGACACGC
TCATGTGCAGAAGGCACGGCCGCCATCTGTGCCTGCAGCAGCCGCCACCAGGGCTCACCAGGCAAGGG
CTGGAAGTGGGGTGGCTGTAGCGAGGACATCGAGTTTGGTGGCATGGTGTCTCGGGAGTTCGCCGACG
CCCGGGAGAACCGGCCAGATGCCCGCTCAGCCATGAACCGCCACAACAACGAGGCTGGGCGCCAGGCC
ATCGCCAGCCACATGCACCTCAAGTGCAAGTGCCACGCGCTGTCGGGCAGCTGCGAGGTGAAGACATG
CTGGTGGTCGCAACCCGACTTCCGCGCCATCGGTGACTTCCTCAAGGACAAGTACGACAGCGCCTCGG
AGATGGTGGTGGAGAAGCACCGGGAGTCCCGCGGCTGGGTGGAGACCCTGCGGCCGCGCTACACCTAC
TTCAAGGTGCCCACGGAGCGCGACCTGGTCTACTACGAGGCCTCGCCCAACTTCTGCGAGCCCAACCC
TGAGACGGGCTCCTTCGGCACGCGCGACCGCACCTGCAACGTCAGCTCGCACGGCATCGACGGCTGCG
ACCTGCTGTGCTGCGGCCGCGGCCACAACGCGCGAGCGGAGCGGCGCCGGGAGAAGTGCCGCTGCGTG
TTCCACTGGTGCTGCTACGTCAGCTGCCAGCAGTGCACGCGCGTCTACGACGTGCACACCTGCAAGTA
GGCACCGGCCGCGGCTCCCCCTGGACCG

| | | | |
|---|---|---|---|
| NOV5t, SNP13378438 of | SEQ ID NO: 178 | | MW at 39352.3 kD |
| CG54611-01, Protein Sequence | SNP Pos: 40 | 352 aa | SNP Change: Ile to Thr |

MAPLGYFLLLCSLKQALGSYPIWWSLAVGPQYSSLGSQPTLCASIPCLVPKQLRFCRNYVEIMPSVAE
GIKIGIQECQHQFRGRRWNCTTVHDSLAIFGPVLDKATRESAFVHAIASAGVAFAVTRSCAEGTAAIC
GCSSRHQGSPGKGWKWGGCSEDIEFGGMVSREFADARENRPDARSAMNRHNNEAGRQAIASHMHLKCK
CHGLSGSCEVKTCWWSQPDFRAIGDFLKDKYDSASEMVVEKHRESRGWVETLRPRYTYFKVPTERDLV
YYEASPNFCEPNPETGSFGTRDRTCNVSSHGIDGCDLLCGGRGHNARAERRREKCRCVFHWCCYVSCQ
ECTRVYDVHTCK

| | | |
|---|---|---|
| | SEQ ID NO: 179 | 1116 bp |
| NOV5u, SNP13378437 of | ORF Start: ATG at 31 | ORF Stop: TAG at 1087 |
| CG54611-01, DNA Sequence | SNP Pos: 160 | SNP Change: A to G |

TCCCGGCCCTCCGCGCCCTCTCGCGCGGCGATGGCCCCACTCGGATACTTCTTACTCCTCTGCAGCCT
GAAGCAGGCTCTGGGCAGCTACCCGATCTGGTGGTCGCTGGCTGTTGGGCCACAGTATTCCTCCCTGG
GCTCGCAGCCCATCCTGTGTGCCGGCATCCCGGGCCTGGTCCCCAAGCAGCTCCGCTTCTGCAGGAAC
TACGTGGACATCATGCCCAGCGTGGCCGAGGGCATCAAGATTGGCATCCAGGAGTGCCAGCACCAGTT
CCGCGGCCGCCGGTGGAACTGCACCACCGTCCACGACAGCCTGGCCATCTTCGGGCCCGTGCTGGACA
AAGCTACCAGGGAGTCGGCCTTTGTCCACGCCATTGCCTCAGCCGGTGTGGCCTTTGCAGTGACACGC
TCATGTGCAGAAGGCACGGCCGCCATCTGTGGCTGCAGCAGCCGCCACCAGGGCTCACCAGGCAAGGG
CTGGAAGTGGGGTGGCTGTAGCGAGGACATCGAGTTTGGTGGGATGGTGTCTCGGGAGTTCGCCGACG
CCCGGGAGAACCGGCCAGATGCCCGCTCAGCCATGAACCCCCACAACAACGAGGCTGGGCGCCAGGCC
ATCGCCAGCCACATGCACCTCAAGTGCAAGTGCCACGGGCTGTCGGGCAGCTGCGAGGTGAAGACATG
CTGGTGGTCGCAACCCGACTTCCGCGCCATCGGTGACTTCCTCAAGGACAAGTACGACAGCGCCTCGG
AGATGGTGGTGGAGAAGCACCGGGAGTCCCGCGGCTGGGTGGAGACCCTGCGCCCGCGCTACACCTAC
TTCAAGGTGCCCACGGAGCGCGACCTGGTCTACTACGAGGCCTCCCCCAACTTCTGCCAGCCCAACCC
TGAGACGGGCTCCTTCGGCACGCGCGACCGCACCTGCAACGTCAGCTCGCACGGCATCGACGGCTGCG
ACCTGCTGTGCTGCGGCCGCGGCCACAACGCGCGAGCGGAGCGGCGCCGGGAGAAGTGCCGCTGCGTG
TTCCACTGGTGCTGCTACGTCAGCTGCCAGGAGTGCACGCGCGTCTACGACGTGCACACCTGCAAGTA
GGCACCGGCCGCGGCTCCCCCTGGACGG

| | | | |
|---|---|---|---|
| NOV5u, SNP13378437 of | SEQ ID NO: 180 | | MW at 39334.3 kD |
| CG54611-01, Protein Sequence | SNP Pos: 44 | 352 aa | SNP Change: Ser to Gly |

MAPLGYFLLLCSLKQALGSYPIWWSLAVGPQYSSLGSQPILCAGIPGLVPKQLRFCRNYVEIMPSVAE
GIKIGIQECQHQFRGRRWNCTTVHDSLAIFGPVLDKATRESAFVHAIASAGVAFAVTRSCAEGTAAIC
GCSSRHQGSPGKGWKWGGCSEDIEFGGMVSREFADARENRPDARSANNRHNNEAGRQAIASHMHLKCK
CHGLSGSCEVKTCWWSQPDFRAICDFLKDKYDSASEMVVEKHRESRGWVETLRPRYTYFKVPTERDLV
YYEASPNFCEPNPETGSFGTRDRTCNVSSHGIDGCDLLCCGRGHNARAERRREKCRCVFHWCCYVSCQ
ECTRVYDVHTCK

| | | |
|---|---|---|
| | SEQ ID NO: 181 | 1116 bp |
| NOV5v, SNP13381548 of | ORF Start: ATG at 31 | ORF Stop: TAG at 1087 |
| CG54611-01, DNA Sequence | SNP Pos: 430 | SNP Change: G to A |

TCCCGGCCCTCCGCGCCCTCTCGCGCGGCGATGGCCCCACTCGGATACTTCTTACTCCTCTGCAGCCT
GAAGCAGGCTCTGGGCAGCTACCCGATCTGGTGGTCGCTGGCTGTTGGGCCACAGTATTCCTCCCTGG
GCTCGCAGCCCATCCTGTGTGCCAGCATCCCGGGCCTGGTCCCCAAGCAGCTCCGCTTCTGCAGGAAC
TACGTGGAGATCATGCCCAGCGTGGCCGAGGGCATCAAGATTGGCATCCAGGAGTGCCAGCACCAGTT
CCGCGGCCGCCGGTGGAACTGCACCACCGTCCACGACAGCCTGGCCATCTTCGGGCCCGTGCTGGACA
AAGCTACCAGGGAGTCGGCCTTTGTCCACGCCATTGCCTCAGCCGGTGTGGCCTTTGCAGTGACACGC
TCATGTGCAGAAGGCACGGCCACCATCTGTGGCTGCAGCAGCCGCCACCAGGGCTCACCAGGCAAGGG
CTGGAAGTGGGGTGGCTGTAGCGAGGACATCGAGTTTGGTGGGATGGTGTCTCGCGAGTTCGCCGACG
CCCGGGAGAACCGGCCAGATGCCCGCTCAGCCATGAACCGCCACAACAACGAGGCTGGGCGCCAGGCC
ATCGCCAGCCACATGCACCTCAAGTGCAAGTGCCACGGGCTGTCGGGCAGCTGCGAGGTGAAGACATG
CTGGTGGTCGCAACCCGACTTCCGCGCCATCGGTGACTTCCTCAAGGACAAGTACGACAGCGCCTCGG
AGATGGTGGTGGAGAAGCACCGGGAGTCCCGCGGCTGGGTGGAGACCCTGCGGCCGCGCTACACCTAC
TTCAAGGTGCCCACGGAGCGCGACCTGGTCTACTACGAGGCCTCGCCCAACTTCTGCGAGCCCAACCC
TGAGACGGGCTCCTTCGGCACGCGCGACCGCACCTGGAACGTCAGCTCGCACGGCATCGACGGCTGCG
ACCTGCTGTGCTGCGGCCGCGGCCACAACGCGCGAGCGGAGCGGCGCCGGGAGAAGTGCCGCTGCGTG
TTCCACTGGTGCTGCTACGTCAGCTGCCAGGAGTGCACGCGCGTCTACGACGTGCACACCTGCAAGTA
GGCACCGGCCGCGGCTCCCCCTGGACGG

| | | | |
|---|---|---|---|
| NOV5v, SNP13381548 of | SEQ ID NO: 182 | | MW at 39394.3 kD |
| CG54611-01, Protein Sequence | SNP Pos: 134 | 352 aa | SNP Change: Ala to Thr |

MAPLGYFLLLCSLKQALGSYPIWWSLAVGPQYSSLGSQPILCASIPGLVPKQLRFCRNYVEIMPSVAE
GIKIGIQECQHQFRGRRWNCTTVHDSLAIFGPVLDKATRESAFVHAIASAGVAFAVTRSCAEGTATIC
GCSSRHQGSPGKGWKWGGCSEDIEFGGMVSREFADARENRPDARSAMNRHNNEAGRQAIASHMHLKCK
CHGLSGSCEVKTCWWSQPDFRAIGDFLKDKYDSASEMVVEKHRESRGWVETLRPRYTYFKVPTERDLV
YYEASPNFCEPNPETGSFGTRDRTCNVSSHGIDGCDLLCCGRGHNARAERRREKCRCVFHWCCYVSCQ
ECTRVYDVHTCK

| | | |
|---|---|---|
| | SEQ ID NO: 183 | 1116 bp |
| NOV5w, SNP13381645 of | ORF Start: ATG at 31 | ORF Stop: TAG at 1087 |
| CG54611-01, DNA Sequence | SNP Pos: 664 | SNP Change: T to C |

TCCCGGCCCTCCCCGCCCTCTCGCGCGGCGATGGCCCCACTCGGATACTTCTTACTCCTCTGCAGCCT
GAAGCAGGCTCTGGGCAGCTACCCGATCTGGTGGTCGCTGGCTGTTGGGCCACAGTATTCCTCCCTGG
GCTCGCAGCCCATCCTGTGTGCCAGCATCCCGGGCCTGGTCCCCAAGCAGCTCCGCTTCTGCAGGAAC
TACGTGGAGATCATGCCCAGCGTGGCCGAGGGCATCAAGATTGGCATCCAGGAGTGCCAGCACCAGTT
CCGCGGCCGCCGGTCGAACTGCACCACCGTCCACGACAGCCTGGCCATCTTCGGGCCCGTCCTGGACA
AAGCTACCAGGGAGTCGGCCTTTGTCCACGCCATTGCCTCAGCCGGTGTGGCCTTTGCAGTGACACGC
TCATGTGCAGAAGGCACGGCCGCCATCTGTGGCTGCAGCAGCCGCCACCAGGGCTCACCAGGCAAGGG
CTGGAAGTCGGGTGGCTGTAGCGAGGACATCGAGTTTGCTGGGATGGTGTCTCGGGAGTTCGCCGACG
CCCGGGAGAACCGGCCAGATGCCCGCTCAGCCATGAACCGCCACAACAACGAGGCTGGGCGCCAGGCC
ATCGCCAGCCACATGCACCTCAAGTGCAAGTGCCACGGGCTGTCGGGCAGCCGCGAGGTGAAGACATG
CTGGTGGTCGCAACCCGACTTCCGCGCCATCGGTGACTTCCTCAAGGACAAGTACGACAGCGCCTCGG
AGATGGTGGTGGAGAAGCACCGGGAGTCCCGCGGCTGGGTGGAGACCCTGCGGCCGCGCTACACCTAC
TTCAAGGTGCCCACGGAGCGCGACCTGGTCTACTACGAGGCCTCGCCCAACTTCTGCGAGCCCAACCC
TGAGACGGGCTCCTTCGGCACGCGCGACCGCACCTGCAACGTCAGCTCGCACGGCATCGACGGCTGCG
ACCTGCTGTGCTGCGGCCGCGGCCACAACGCGCGAGCGGAGCGGCGCCGGGAGAAGTGCCGCTGCGTG
TTCCACTGGTGCTGCTACGTCAGCTGCCAGGAGTGCACGCGCGTCTACGACGTGCACACCTGCAAGTA
GGCACCGGCCGCGCCTCCCCCTGCACGG

| | | | |
|---|---|---|---|
| NOV5w, SNP13381645 of | SEQ ID NO: 184 | | MW at 39417.4 kD |
| CG54611-01, Protein Sequence | SNP Pos: 212 | 352 aa | SNP Change: Cys to Arg |

MAPLGYFLLLCSLKQALGSYPIWWSLAVGPQYSSLGSQPILCASIPGLVPKQLRFCRNYVEIMPSVAE
GIKIGIQECQHQFRGRRWNCTTVHDSLAIFGPVLDKATRESAFVHAIASAGVAFAVTRSCAEGTAAIC
GCSSRHQGSPGKGWKWGGCSEDIEFGGMVSREFADARENRPDARSANNRHNNEAGRQAIASHMHLKCK
CHGLSGSREVKTCWWSQPDFRAIGDFLKDKYDSASEMVVEKHRESRGWVETLRPRYTYFKVPTERDLV
YYEASPNFCEPNPETGSFCTRDRTCNVSSHGIDGCDLLCCGRGHNARAERRREKCRCVFHWCCYVSCQ
ECTRVYDVHTCK

| | | |
|---|---|---|
| | SEQ ID NO: 185 | 1116 bp |
| NOV5x, SNP13381646 of | ORF Start: ATG at 31 | ORF Stop: TAG at 1087 |
| CG54611-01, DNA Sequence | SNP Pos: 731 | SNP Change: A to G |

TCCCGGCCCTCCGCGCCCTCTCGCGCGGCGATGGCCCCACTCGGATACTTCTTACTCCTCTGCAGCCT
GAAGCAGGCTCTGGGCAGCTACCCGATCTGGTGGTCGCTGGCTGTTGGGCCACAGTATTCCTCCCTGC
GCTCGCAGCCCATCCTGTGTGCCAGCATCCCGGGCCTGGTCCCCAAGCAGCTCCGCTTCTGCAGGAAC
TACGTGGAGATCATGCCCAGCGTGGCCGAGGGCATCAAGATTGGCATCCAGGAGTGCCAGCACCAGTT
CCGCGGCCGCCGGTGGAACTGCACCACCGTCCACGACAGCCTGGCCATCTTCGGGCCCGTGCTGGACA
AAGCTACCAGGGAGTCGGCCTTTGTCCACGCCATTGCCTCAGCCGGTGTGGCCTTTGCAGTGACACGC
TCATGTGCAGAAGGCACGGCCGCCATCTGTGGCTGCAGCAGCCGCCACCAGGGCTCACCAGGCAAGGG
CTGGAAGTGGGGTGGCTGTAGCGAGGACATCGAGTTTGGTGGCATGGTGTCTCGGGAGTTCGCCGACG
CCCGGGAGAACCGGCCAGATGCCCGCTCAGCCATGAACCGCCACAACAACGAGGCTGGGCGCCAGGCC
ATCGCCAGCCACATGCACCTCAAGTGCAAGTGCCACGGGCTGTCGGGCAGCTGCGAGGTGAAGACATG
CTGGTGGTCGCAACCCGACTTCCGCGCCATCGGTGACTTCCTCAAGGACAGGTACGACAGCGCCTCGG
AGATGGTGGTGGAGAAGCACCGGCAGTCCCGCGGCTGGGTGGAGACCCTGCGGCCGCGCTACACCTAC
TTCAAGGTGCCCACGGAGCGCGACCTGGTCTACTACGAGGCCTCGCCCAACTTCTGCGAGCCCAACCC
TGACACGGGCTCCTTCGGCACGCGCGACCGCACCTGCAACGTCAGCTCGCACGGCATCGACGGCTGCG
ACCTGCTGTGCTGCGGCCGCGGCCACAACGCGCGAGCGGAGCGGCGCCGGGAGAAGTGCCGCTGCGTG
TTCCACTGGTGCTGCTACGTCAGCTGCCAGGAGTGCACGCGCGTCTACGACGTGCACACCTGCAAGTA
GGCACCGGCCGCGGCTCCCCCTGGACGG

| | | | |
|---|---|---|---|
| NOV5x, SNP13381646 of SEQ ID NO: 186 | | MW at 39392.3 kD | |
| CG54611-01, Protein Sequence | SNP Pos: 234 | 352 aa | SNP Change: Lys to Arg |

MAPLGYFLLLCSLKQALGSYPIWWSLAVGPQYSSLGSQPILCASIPGLVPKQLRFCRNYVEIMPSVAE
GIKIGIQECQHQFRGRRWNCTTVHDSLAIFGPVLDKATRESAFVHAIASAGVAFAVTRSCAEGTAAIC
GCSSRHQGSPGKGWKWGGCSEDIEFGGMVSREFADARENRPDARSANNRHNNEAGRQAIASHMHLKCK
CHGLSGSCEVKTCWWSQPDFRAIGDFLKDRYDSASEMVVEKHRESRGWVETLRPRYTYFKVPTERDLV
YYEASPNFCEPNPETGSFGTRDRTCNVSSHGIDGCDLLCCGRGHNARAERRREKCRCVFHWCCYVSCQ
ECTRVYDVHTCK

| | | |
|---|---|---|
| | SEQ ID NO: 187 | 1116 bp |
| NOV6y, SNP13381647 of | ORF Start: ATG at 31 | ORF Stop: TAG at 1087 |
| CG54611-01, DNA Sequence | SNP Pos: 895 | SNP Change: T to C |

TCCCGGCCCTCCGCGCCCTCTCGCGCGGCGATGGCCCCACTCGGATACTTCTTACTCCTCTGCAGCCT
GAAGCAGGCTCTGGGCAGCTACCCGATCTGGTGGTCGCTGGCTGTTGGGCCACAGTATTCCTCCCTGG
GCTCGCAGCCCATCCTGTGTGCCAGCATCCCGGGCCTGGTCCCCAAGCAGCTCCGCTTCTGCAGGAAC
TACGTGGAGATCATGCCCAGCGTGGCCGAGGGCATCAAGATTGGCATCCAGGAGTGCCAGCACCAGTT
CCGCGGCCGCCGGTGGAACTGCACCACCGTCCACGACAGCCTGGCCATCTTCGGGCCCGTGCTGGACA
AAGCTACCAGGGAGTCGGCCTTTGTCCACGCCATTGCCTCAGCCGGTGTGGCCTTTGCAGTGACACGC
TCATGTGCAGAAGGCACGGCCGCCATCTGTGGCTGCAGCAGCCGCCACCAGGGCTCACCAGGCAAGGG
CTGGAAGTGGGGTGGCTGTAGCCAGGACATCGAGTTTGGTGGGATGGTGTCTCGGGAGTTCGCCGACG
CCCGGGAGAACCGGCCAGATGCCCGCTCAGCCATGAACCGCCACAACAACGAGGCTGGGCGCCAGGCC
ATCGCCAGCCACATGCACCTCAAGTGCAAGTGCCACGGGCTGTCGGGCAGCTGCGAGGTGAAGACATG
CTGGTGGTCGCAACCCGACTTCCGCGCCATCGGTGACTTCCTCAAGGACAAGTACGACAGCGCCTCGG
AGATGGTGGTGGAGAAGCACCGGGAGTCCCGCGGCTGGGTGGAGACCCTGCGGCCGCGCTACACCTAC
TTCAAGGTGCCCACGGAGCGCGACCTGGTCTACTACGAGGCCTCGCCCAACTTCTGCGAGCCCAACCC
TGAGACGGGCCCCTTCGGCACGCGCGACCGCACCTGCAACGTCAGCTCCCACGGCATCGACGGCTGCG
ACCTGCTGTGCTGCGGCCGCGGCCACAACGCGCGAGCGGAGCGGCGCCGGGAGAAGTGCCGCTGCGTG
TTCCACTGGTGCTGCTACGTCAGCTGCCAGGAGTGCACGCCCGTCTACGACGTGCACACCTGCAAGTA
GGCACCGGCCGCGGCTCCCCCTGGACGG

| | | | |
|---|---|---|---|
| NOV6y, SNP13381647 of | SEQ ID NO: 188 | | MW at 39374.4 kD |
| CG54611-01, Protein Sequence | SNP Pos: 289 | 352 aa | SNP Change: Ser to Pro |

MAPLQYFLLLCSLKQALGSYPIWWSLAVGPQYSSLGSQPILCASIPGLVPKQLRFCRNYVEIMPSVAE
GIKIGIQECQHQFRGRRWNCTTVHDSLAIFGPVLDKATRESAFVHAIASAGVAFAVTRSCAEGTAAIC
GCSSRHQGSPGKGWKWGGCSEDIEFGGMVSREFADARENRPDARSAMNRHNNEAGRQAIASHMHLKCK
CHGLSGSCEVKTCWWSQPDFRAIGDFLKDKYDSASEMVVEKHRESRGWVETLRPRYTYFKVPTERDLV
YYEASPNFCEPNPETGPFGTRDRTCNVSSHGIDGCDLLCCGRCHNARAERRREKCRCVFHWCCYVSCQ
ECTRVYDVHTCK

| | | |
|---|---|---|
| | SEQ ID NO: 189 | 1116 bp |
| NOV5z, SNP13381648 of | ORF Start: ATG at 31 | ORF Stop: TAG at 1087 |
| CG54611-01, DNA Sequence | SNP Pos: 961 | SNP Change: T to C |

TCCCGGCCCTCCGCGCCCTCTCGCGCGGCGATGGCCCCACTCCGATACTTCTTACTCCTCTGCAGCCT
GAAGCAGGCTCTGGGCAGCTACCCGATCTGGTGGTCGCTGGCTGTTGGGCCACAGTATTCCTCCCTGG
GCTCGCAGCCCATCCTGTGTGCCAGCATCCCGGGCCTGGTCCCCAAGCAGCTCCGCTTCTGCAGGAAC
TACGTGGAGATCATGCCCAGCGTGGCCGAGGGCATCAAGATTGGCATCCAGGAGTGCCAGCACCAGTT
CCGCGGCCGCCGGTGGAACTGCACCACCGTCCACGACAGCCTGGCCATCTTCGGGCCCGTGCTGCACA
AAGCTACCAGGGAGTCGGCCTTTGTCCACGCCATTGCCTCAGCCGGTGTGGCCTTTGCAGTGACACGC
TCATGTGCAGAAGGCACGGCCGCCATCTGTGGCTGCAGCAGCCGCCACCAGGGCTCACCAGGCAAGGG
CTGGAAGTGGGGTGGCTGTAGCGAGGACATCGAGTTTGGTGGGATGGTGTCTCGGGAGTTCGCCGACG
CCCGGGAGAACCGGCCAGATGCCCGCTCAGCCATGAACCGCCACAACAACGAGGCTGGGCGCCAGGCC
ATCGCCAGCCACATGCACCTCAAGTGCAAGTGCCACGGGCTGTCGGGCAGCTGCGAGGTGAAGACATG
CTGGTGGTCGCAACCCGACTTCCGCGCCATCGCTGACTTCCTCAACGACAAGTACGACAGCGCCTCGG
AGATGGTGGTGGAGAAGCACCGGGAGTCCCGCGGCTGGGTGGAGACCCTGCGGCCGCGCTACACCTAC
TTCAAGGTGCCCACGGAGCGCCACCTGGTCTACTACGAGGCCTCGCCCAACTTCTGCGAGCCCAACCC
TGAGACGGGCTCCTTCGGCACGCGCGACCGCACCTGCAACGTCAGCTCGCACGGCATCGACGGCTGCG
ACCTGCTGCGCTGCGGCCGCGGCCACAACGCGCGAGCGGAGCGGCGGCGGGAGAAGTGCCGCTGCGTG
TTCCACTGGTGCTGCTACGTCAGCTGCCAGGAGTGCACCCGCGTCTACGACGTGCACACCTGCAAGTA
GGCACCGGCCGCGGCTCCCCCTGGACGG

| | | | |
|---|---|---|---|
| NOV5z, SNP13381648 of | SEQ ID NO: 190 | | MW at 39417.4 kD |
| CG54611-01, Protein Sequence | SNP Pos: 311 | 352 aa | SNP Change: Cys to Arg |

MAPLGYFLLLCSLKQALGSYPIWWSLAVGPQYSSLGSQPILCASIPGLVPKQLRFCRNYVEIMPSVAE
GIKIGIQECQHQFRGRRWNCTTVHDSLAIFGPVLDKATRESAFVHAIASAGVAFAVTRSCAEGTAAIC
GCSSRHQGSPGKGWKWGGCSEDIEFGGMVSREFADARENRPDARSAMNRHNNEAGRQAIASHNHLKCK
CHGLSGSCEVKTCWWSQPDFRAIGDFLKDKYDSASEMVVEKHRESRGWVETLRPRYTYFKVPTERDLV
YYEASPNFCEPNPETGSFGTRDRTCNVSSHGIDGCDLLRCGRGHNAHAERRREKCRCVFHWCCYVSCQ
ECTRVYDVHTCK

| | | |
|---|---|---|
| | SEQ ID NO: 191 | 1116 bp |
| NOV5aa, SNP13381649 of | ORF Start: ATG at 31 | ORF Stop: TAG at 1087 |
| CG54611-01, DNA Sequence | SNP Pos: 1073 | SNP Change: T to C |

TCCCGGCCCTCCGCGCCCTCTCGCGCGGCGATGGCCCCACTCGGATACTTCTTACTCCTCTGCAGCCT
GAAGCAGGCTCTGGGCAGCTACCCGATCTGGTGGTCGCTGGCTGTTGGGCCACAGTATTCCTCCCTGG
GCTCGCAGCCCATCCTGTGTGCCAGCATCCCGGGCCTGGTCCCCAAGCAGCTCCGCTTCTGCAGGAAC
TACGTCGAGATCATGCCCAGCGTGGCCGAGCGCATCAAGATTGGCATCCAGGAGTGCCAGCACCAGTT
CCGCGGCCGCCGGTGGAACTGCACCACCGTCCACGACAGCCTGGCCATCTTCGGGCCCGTGCTGGACA
AAGCTACCAGGGAGTCGGCCTTTGTCCACGCCATTGCCTCAGCCGGTGTGGCCTTTGCAGTGACACGC
TCATGTGCAGAAGGCACGGCCGCCATCTGTGGCTGCAGCAGCCGCCACCAGGGCTCACCAGGCAAGGG
CTGGAAGTGGGGTGGCTGTAGCGAGGACATCGAGTTTGGTGGGATGGTGTCTCGGGAGTTCGCCGACG
CCCGGGAGAACCGGCCAGATGCCCGCTCAGCCATGAACCGCCACAACAACGAGGCTGGGCGCCAGGCC
ATCGCCAGCCACATGCACCTCAAGTGCAAGTGCCACGGGCTGTCGGGCAGCTGCGAGGTGAAGACATG
CTGGTGGTCGCAACCCGACTTCCGCGCCATCGGTGACTTCCTCAAGGACAAGTACGACAGCGCCTCGG
AGATGGTGGTGGAGAAGCACCGGGAGTCCCGCGGCTGGGTGGAGACCCTGCGGCCGCGCTACACCTAC
TTCAAGGTGCCCACGGAGCGCGACCTGGTCTACTACGAGGCCTCGCCCAACTTCTGCGAGCCCAACCC
TGAGACGGGCTCCTTCGGCACGCGCGACCGCACCTGCAACGTCAGCTCGCACGGCATCGACGGCTGCG
ACCTGCTGTGCTGCGGCCGCGGCCACAACGCGCGAGCGGAGCGGCGCCGGGAGAAGTGCCGCTGCGTG
TTCCACTGGTGCTCCTACGTCAGCTGCCAGGAGTGCACCCGCGTCTACGACGCGCACACCTGCAAGTA
GGCACCGGCCGCGCCTCCCCCTGGACGG

| | | | |
|---|---|---|---|
| NOV5aa, SNP13381649 of | SEQ ID NO: 192 | | MW at 39336.3 kD |
| CG54611-01, Protein Sequence | SNP Pos: 348 | 352 aa | SNP Change: Val to Ala |

MAPLGYFLLLCSLKQALGSYPIWWSLAVGPQYSSLGSQPILCASIPGLVPKQLRFCRNYVEIMPSVAE
GIKIGIQECQHQFRGRRWNCTTVHDSLAIFGPVLDKATRESAFVHAIASAGVAFAVTRSCAEGTAAIC
GCSSRHQGSPGKGWKWGGCSEDIEFGGMVSREFADARENRPDARSAMNRHNNEAGRQAIASHMHLKCK
CHGLSGSCEVKTCWWSQPDFRAIGDFLKDKYDSASEMVVEKHRESRGWVETLRPRYTYFKVPTERDLV
YYEASPNFCEPNPETGSFGTRDRTCNVSSHGIDGCDLLCCGRGHNARAERRREKCRCVFHWCCYVSCQ
ECTRVYDAHTCK

[0331] A ClustalW comparison of the above protein sequences yields the following sequence alignment shown in Table 5B.

TABLE 5B
Comparison of the NOV5 protein sequences.

| | |
|---|---|
| NOV5a | ---------------------------MAPLGYFLLLCSLKQALGSYPIWWSLAVGPQYS |
| NOV5b | -------------------------------------------GSSYPIWWSLAVGPQYS |
| NOV5c | ---------------------------MAPLGYFLLLCSLKQALGSYPIWWSLAVGPQYS |
| NOV5d | ---------------------------MAPLGYFLLLCSLKQALGSYPIWWSLAVGPQYS |
| NOV5e | ---------------------------------------------SYPIWWSLAVGPQYS |
| NOV5f | ---------------------------------------------SYPIWWSLAVGPQYS |
| NOV5g | ---------------------------MAPLGYFLLLCSLKQALGSYPIWWSLAVGPQYS |
| NOV5h | -----------------------TGSTMAPLGYFLLLCSLKQALGSYPIWWSLAVGPQYS |
| NOV5i | ---------------------------MAPLGYFLLLCSLKQALGSYPIWWSLAVGPQYS |
| NOV5j | ---------------------------MAPLGYFLLLCSLKQALGSYPIWWSLAVGPQYS |
| NOV5k | ---------------------------------------------SYPIWWSLAVGPQYS |
| NOV5l | ---------------------------MAPLGYFLLLCSLKQALGSYPIWWSLAVGPQYS |
| NOV5m | ---------------------------MAPLGYFLLLCSLKQALGSYPIWWSLAVGPQYS |
| NOV5n | MAPLGYFLLMAPLGYFLLMAPLGYFLLMAPLGYFLLLCSLKQALGSYPIWWSLAVCPQYS |
| NOV5o | ---------------------------MAPLGYFLLLCSLKQALGSYPIWWSLAVGPQYS |
| NOV5p | ---------------------------MAPLGYFLLLCSLKQALGSYPIWWSLAVGPQYS |
| NOV5q | MAPLGYFLLMAPLGYFLLMAPLGYFLLMAPLGYFLLLCSLKQALGSYPIWWSLAVCPQYS |
| NOV5r | ---------------------------MAPLGYFLLLCSLKQALGSYPIWWSLAVGPQYS |
| NOV5s | ---------------------------MAPLGYFLLLCSLKQALGSYPIWWSLAVGPQYS |
| NOV5a | SLGSQPILCASIPGLVPKQLRFCRNYVEIMPSVAEGIKIGIQECQHQFRGRRWNCTTVHD |
| NOV5b | SLGSQPILCASIPGLVPKQLRFCRNYVEIMPSVAEGIKIGIQECQHQFRGRRWNCTTVHD |
| NOV5c | SLGSQPILCASIPGLVPKQLRFCRNYVEIMPSVAEGIKIGIQECQHQFRGRRWNCTTVHD |
| NOV5d | SLGSQPILCASIPGLVPKQLRFCRNYVEIMPSVAEGIKIGIQECQHQFRGRRWNCTTVHD |
| NOV5e | SLGSQPILCASIPGLVPKQLRFCRNYVEIMPSVAEGIKIGIQECQHQFRGRRWNCTTVHD |
| NOV5f | SLGSQPILCASIPGLVPKQLRFCRNYVEIMPSVAEGIKIGIQECQHQFRGRRWNCTTVHD |
| NOV5g | SLGSQPILCASIPGLVPKQLRFCRNYVEIMPSVAEGIKIGIQECQHQFRGRRWNCTTVHD |
| NOV5h | SLGSQPILCASIPGLVPKQLRFCRNYVEIMPSVAEGIKIGIQECQHQFRGRRWNCTTVHD |
| NOV5i | SLGSQPILCASIPGLVPKQLRFCRNYVEIMPSVAEGIKIGIQECQHQFRGRRWNCTTVHD |
| NOV5j | SLGSQPILCASIPGLVPKQLRFCRNYVEIMPSVAEGIKIGIQECQHQFRGRRWNCTTVHD |
| NOV5k | SLGSQPILCASIPGLVPKQLRFCRNYVEIMPSVAEGIKIGIQECQHQFRGRRWNCTTVHD |
| NOV5l | SLGSQPILCASIPGLVPKQLRFCRNYVEIMPSVAEGIKIGIQECQHQFRGRRWNCTTVHD |
| NOV5m | SLGSQPILCASIPGLVPKQLRFCRNYVEIMPSVAEGIKIGIQECQHQFRGRRWNCTTVHD |
| NOV5n | SLGSQPILCASIPGLVPKQLRFCRNYVEIMPSVAEGIKIGIQECQHQFRGRRWNCTTVHD |
| NOV5o | SLGSQPILCASIPGLVPKQLRFCRNYVEIMPSVAEGIKIGIQECQHQFRGRRWNCTTVHD |
| NOV5p | SLGSQPILCASIPGLVPKQLRFCRNYVEIMPSVAEGIKIGIQECQHQFRGRRWNCTTVHD |
| NOV5q | SLGSQPILCASIPGLVPKQLRFCRNYVEIMPSVAEGIKIGIQECQHQFRGRRWNCTTVHD |
| NOV5r | SLGSQPILCASIPGLVPKQLRFCRNYVEIMPSVAEGIKIGIQECQHQFRGRRWNCTTVHD |
| NOV5s | SLGSQPILCASIPGLVPKQLRFCRNYVEIMPSVAEGIKIGIQECQHQFRGRRWNCTTVHD |
| NOV5a | SLAIFGPVLDKATRESAFVHAIASAGVAFAVTRSCAEGTAAICGCSSRHQGSPGKGWKWG |
| NOV5b | SLAIFGPVLDKATRESAFVHAIASAGVAFAVTRSCAEGTAAICGCSSRHQGSPGKGWKWG |
| NOV5c | SLAIFGPVLDKATRESAFVHAIASAGVAFAVTRSCAEGTAAICGCSSRHQGSPGKGWKWG |
| NOV5d | SLAIFGPVLDKATRESAFVHAIASAGVAFAVTRSCAEGTAAICGCSSRHQGSPGKGWKWG |
| NOV5e | SLAIFGPVLDKATRESAFVHAIASAGVAFAVTRSCAEGTAAICGCSSRHQGSPGKGWKWG |
| NOV5f | SLAIFGPVLDKATRESAFVHAIASAGVAFAVTRSCAEGTAAICGCSSRHQGSPGKGWKWG |
| NOV5g | SLAIFGPVLDKATRESAFVHAIASAGVAFAVTRSCAEGTAAICGCSSRHQGSPGKGWKWG |
| NOV5h | SLAIFGPVLDKATRESAFVHAIASAGVAFAVTRSCAEGTAAICGCSSRHQGSPGKGWKWG |
| NOV5i | SLAIFGPVLDKATRESAFVHAIASAGVAFAVTRSCAEGTAAICGCSSRHQGSPGKGWKWG |
| NOV5j | SLAIFGPVLDKATRESAFVHAIASAGVAFAVTRSCAEGTAAICGCSSRHQGSPGKGWKWG |
| NOV5k | SLAIFGPVLDKATRESAFVHAIASAGVAFAVTRSCAEGTAAICGCSSRHQGSPGKGWKWG |
| NOV5l | SLAIFGPVLDKATRESAFVHAIASAGVAFAVTRSCAEGTAAICGCSSRHQGSPGKGWKWG |
| NOV5m | SLAIFGPVLDKATRESAFVHAIASAGVAFAVTRSCAEGTAAICGCSSRHQGSPGKGWKWG |
| NOV5n | SLAIFGPVLDKATRESAFVHAIASAGVAFAVTRSCAEGTAAICGCSSRHQGSPGKGWKWG |
| NOV5o | SLAIFGPVLDKATRESAFVHAIASAGVAFAVTRSCAEGTAAICGCSSRHQGSPGKGWKWG |
| NOV5p | SLAIFGPVLDKATRESAFVHAIASAGVAFAVTRSCAEGTAAICGCSSRHQGSPGKGWKWG |
| NOV5q | SLAIFGPVLDKATRESAFVHAIASAGVAFAVTRSCAEGTAAICGCSSRHQGSPGKGWKWG |
| NOV5r | SLAIFGPVLDKATRESAFVHAIASAGVAFAVTRSCAEGTAAICGCSSRHQGSPGKGWKWG |
| NOV5s | SLAIFGPVLDKATRESAFVHAIASAGVAFAVTRSCAEGTAAICGCSSRHQGSPGKGWKWG |
| NOV5a | GCSEDIEFGGMVSREFADARENRPDARSAMNRHNNEAGRQAIASHMHLKCKCHGLSGSCE |
| NOV5b | GCSEDIEFGGMVSREFADARENRPDARSAMNRHNNEAGRQAIASHMHLKCKCHGLSGSCE |
| NOV5c | GCSEDIEFGGMVSREFADARENRPDARSAMNRHNNEAGRQAIASHMHLKCKCHGLSGSCE |
| NOV5d | GCSEDIEFGGMVSREFADARENRPDARSAMNRHNNEAGRQAIASHMHLKCKCHGLSGSCE |
| NOV5e | GCSEDIEFGGMVSREFADARENRPDARSAMNRHNNEAGRQAIASHMHLKCKCHGLSGSCE |
| NOV5f | GCSEDIEFGGMVSREFADARENRPDARSAMNRHNNEAGRQAIASHMHLKCKCHGLSGSCE |
| NOV5g | GCSEDIEFGGMVSREFADARENRPDARSAMNRHNNEAGRQAIASHMHLKCKCHGLSGSCE |
| NOV5h | GCSEDIEFGGMVSREFADARENRPDARSAMNRHNNEAGRQAIASHMHLKCKCHGLSGSCE |
| NOV5i | GCSEDIEFGGMVSREFADARENRPDARSAMNRHNNEAGRQAIASHMHLKCKCHGLSGSCE |
| NOV5j | GCSEDIEFGGMVSREFADARENRPDARSAMNRHNNEAGRQAIASHMHLKCKCHGLSGSCE |
| NOV5k | GCSEDIEFGGMVSREFADARENRPDARSAMNRHNNEAGRQAIASHMHLKCKCHGLSGSCE |
| NOV5l | GCSEDIEFGGMVSREFADARENRPDARSAMNRHNNEAGRQAIASHMHLKCKCHGLSGSCE |
| NOV5m | GCSEDIEFGGMVSREFADARENRPDARSAMNRHNNEAGRQ-------------------- |
| NOV5n | GCSEDIEFGGMVSREFADARENRPDARSAMNRHNNEAGRQAIASHMHLKCKCHGLSGSCE |
| NOV5o | GCSEDIEFGGMVSREFADARENRPDARSAMNRHNNEAGRQAIASHMHLKCKCHGLSGSCE |
| NOV5p | GCSEDIEFGGMVSREFADARENRPDARSAMNRHNNEAGRQAIASHMHLKCKCHGLSGSCE |
| NOV5q | GCSEDIEFGGMVSREFADARENRPDARSAMNRHNNEAGRQAIASHMHLKCKCHGLSGSCE |
| NOV5r | GCSEDIEFGGMVSREFADARENRPDARSAMNRHNNEAGRQAIASHMHLKCKCHGLSGSCE |
| NOV5s | GCSEDIEFGGMVSREFADARENRPDARSAMNRHNNEAGRQAIASHMHLKCKCHGLSGSCE |
| NOV5a | VKTCWWSQPDFRAIGDFLKDKYDSASEMVVEKHRESRGWVETLRPRYTYFKVPTERDLVY |
| NOV5b | VKTCWWSQPDFRAIGDFLKDKYDSASEMVVEKHRESRGWVETLRPRYTYFKVPTERDLVY |
| NOV5c | VKTCWWSQPDFRAIGDFLKDKYDSASEMVVEKHRESRGWVETLRPRYTYFKVPTERDLVY |
| NOV5d | VKTCWWSQPDFRAIGDFLKDKYDSASEMVVEKHRESRGWVETLRPRYTYFKVPTERDLVY |
| NOV5e | VKTCWWSQPDFRAIGDFLKDKYDSASEMVVEKHRESRGWVETLRPRYTYFKVPTERDLVY |
| NOV5f | VKTCWWSQPDFRAIGDFLKDKYDSASEMVVEKHRESRGWVETLRPRYTYFKVPTERDLVY |
| NOV5g | VKTCWWSQPDFRAIGDFLKDKYDSASEMVVEKHRESRGWVETLRPRYTYFKVPTERDLVY |
| NOV5h | VKTCWWSQPDFRAIGDFLKDKYDSASEMVVEKHRESRGWVETLRPRYTYFKVPTERDLVY |
| NOV5i | VKTCWWSQPDFRAIGDFLKDKYDSASEMVVEKHRESRGWVETLRPRYTYFKVPTERDLVY |
| NOV5j | VKTCWWSQPDFRAIGDFLKDKYDSASEMVVEKHRESRGWVETLRPRYTYFKVPTERDLVY |
| NOV5k | VKTCWWSQPDFRAIGDFLKDKYDSASEMVVEKHRESRGWVETLRPRYTYFKVPTERDLVY |
| NOV5l | VKTCWWSQPDFRAIGDFLKDKYDSASEMVVEKHRESRGWVETLRPRYTYFKVPTERDLVY |
| NOV5m | -------------------DKYDSASEMVVEKHRESRGWVETLRPRYTYFKVPTERDLVY |
| NOV5n | VKTCWWSQPDFRAIGDFLKDKYDSASEMVVEKHRESRGWVETLRPRYTYFKVPTERDLVY |
| NOV5o | VKTCWWSQPDFRAIGDFLKDKYDSASEMVVEKHRESRGWVETLRPRYTYFKVPTERDLVY |
| NOV5p | VKTCWWSQPDFRAIGDFLKDKYDSASEMVVEKHRESRGWVETLRPRYTYFKVPTERDLVY |
| NOV5q | VKTCWWSQPDFRAIGDFLKDKYDSASEMVVEKHRESRGWVETLRPRYTYFKVPTERDLVY |
| NOV5r | VKTCWWSQPDFRAIGDFLKDKYDSASEMVVEKHRESRGWVETLRPRYTYFKVPTERDLVY |
| NOV5s | VKTCWWSQPDFRAIGDFLKDKYDSASEMVVEKHRESRGWVETLRPRYTYFKVPTERDLVY |
| NOV5a | YEASPNFCEPNPETGSFGTRDRTCNVSSHGIDGCDLLCCGRGHNARAERRREKCRCVFHW |
| NOV5b | YEASPNFCEPNPETGSFGTRDRTCNVSSHGIDGCDLLCCGRGHNARAERRREKCRCVFHW |
| NOV5c | YEASPNFCEPNPETGSFGTRDRTCNVSSHGIDGCDLLCCGRGHNARAERRREKCRCVFHW |
| NOV5d | YEASPNFCEPNPETGSFGTRDRTCNVSSHGIDGCDLLCCGRGHNARAERRREKCRCVFHW |
| NOV5e | YEASPNFCEPNPETGSFGTRDRTCNVSSHGIDGCDLLCCGRGHNARAERRREKCRCVFHW |
| NOV5f | YEASPNFCEPNPETGSFG------------------------------------------ |
| NOV5g | YEASPNFCEPNPETGSFGTRDRTCNVSSHGIDGCDLLCCGRGHNARAERRREKCRCVFHW |
| NOV5h | YEASPNFCEPNPETGSFGTRDRTCNVSSHGIDGCDLLCCGRGHNARAERRREKCRCVFHW |
| NOV5i | YEASPNFCEPNPETGSFGTRDRTCNVSSHGIDGCDLLCCGRGHNARAERRREKCRCVFHW |
| NOV5j | YEASPNFCEPNPETGSFGTRDRTCNVSSHGIDGCDLLCCGRGHNARAERRREKCRCVFHW |
| NOV5k | YEASPNFCEPNPETGSFGTRDRTCNVSSHGIDGCDLLCCGRGHNARAERRREKCRCVFHW |
| NOV5l | YEASPNFCEPNPETGSFGTRDRTCNVSSHGIDGCDLLCCGRGHNARAERRREKCRCVFHW |
| NOV5m | YEASPNFCEPNPETGSFGTRDRTCNVSSHGIDGCDLLCCGRGHNARAERRREKCRCVFHW |
| NOV5n | YEASPNFCEPNPETGSFGTRDRTCNVSSHGIDGCDLLCCGRGHNARAERRREKCRCVFHW |
| NOV5o | YEASPNFCEPNPETGSFGTRDRTCNVSSHGIDGCDLLCCGRGHNARAERRREKCRCVFHW |
| NOV5p | YEASPNFCEPNPETGSFGTRDRTCNVSSHGIDGCDLLCCGRGHNARAERRREKCRCVFHW |
| NOV5q | YEASPNFCEPNPETGSFGTRDRTCNVSSHGIDGCDLLCCGRGHNARAERRREKCRCVFHW |
| NOV5r | YEASPNFCEPNPETGSFGTRDRTCNVSSHGIDGCDLLCCGRGHNARAERRREKCRCVFHW |
| NOV5s | YEASPNFCEPNPETGSFGTRDRTCNVSSHGIDGCDLLCCGRGHNARAERRREKCRCVFHW |
| NOV5a | CCYVSCQECTRVYDVHTCK------ |
| NOV5b | CCYVSCQECTRVYDVHTCKLE---- |
| NOV5c | CCYVSCQECTRVYDVHTCK------ |
| NOV5d | CCYVSCQECTRVYDVHTCK------ |
| NOV5e | CCYVSCQECTRVYDVHTCK------ |
| NOV5f | ---------TRVYDVHTCK------ |
| NOV5g | CCYVSCQECTRVYDVHTCK------ |
| NOV5h | CCYVSCQECTRVYDVHTCKHHHHHH |
| NOV5i | CCYVSCQECTRVYDVHTCK------ |
| NOV5j | CCYVSCQECTRVYDVHTCK------ |
| NOV5k | CCYVSCQECTRVYDVHTCK------ |
| NOV5l | CCYVSCQECTRVYDVHTCK------ |
| NOV5m | CCYVSCQECTRVYDVHTCK------ |
| NOV5n | CCYVSCQECTRVYDVHTCK------ |
| NOV5o | CCYVSCQECTRVYDVHTCK------ |
| NOV5p | CCYVSCQECTRVYDVHTCK------ |
| NOV5q | CCYVSCQECTRVYDVHTCK------ |
| NOV5r | CCYVSCQECTRVYDVHTCK------ |
| NOV5s | CCYVSCQECTRVYDVHTCK------ |
| NOV5a | (SEQ ID NO: 140) |
| NOV5b | (SEQ ID NO: 142) |
| NOV5c | (SEQ ID NO: 144) |
| NOV5d | (SEQ ID NO: 146) |
| NOV5e | (SEQ ID NO: 148) |
| NOV5f | (SEQ ID NO: 150) |
| NOV5g | (SEQ ID NO: 152) |
| NOV5h | (SEQ ID NO: 154) |
| NOV5i | (SEQ ID NO: 156) |
| NOV5j | (SEQ ID NO: 158) |
| NOV5k | (SEQ ID NO: 160) |
| NOV5l | (SEQ ID NO: 162) |
| NOV5m | (SEQ ID NO: 164) |
| NOV5n | (SEQ ID NO: 166) |
| NOV5o | (SEQ ID NO: 168) |
| NOV5p | (SEQ ID NO: 170) |
| NOV5q | (SEQ ID NO: 172) |
| NOV5r | (SEQ ID NO: 174) |
| NOV5s | (SEQ ID NO: 176) |

[0332] Further analysis of the NOV5a protein yielded the following properties shown in Table 5C.

TABLE 5C
Protein Sequence Properties NOVSa

| SignalP analysis: | Cleavage site between residues 19 and 20 | | | |
|---|---|---|---|---|
| PSORT II | PSG: a new signal peptide prediction method | | | |
| analysis: | N-region: length 0; pos.chg 0; neg.chg 0 | | | |
| | H-region: length 13; peak value 9.00 | | | |
| | PSG score: 4.60 | | | |
| | GvH: von Heijne's method for signal seq. recognition | | | |
| | GvH score (threshold: −2.1): 0.73 | | | |
| | possible cleavage site: between 18 and 19 | | | |
| | >>> Seems to have a cleavable signal peptide (1 to 18) | | | |
| | ALOM: Klein et al's method for TM region allocation | | | |
| | Init position for calculation: 19 | | | |
| | Tentative number of TMS(s) for the threshold 0.5: 1 | | | |
| | Number of TMS(s) for threshold 0.5: 0 | | | |
| | PERIPHERAL Likelihood = 4.61 (at 33) | | | |
| | ALOM score: −0.37 (number of TMSs: 0) | | | |
| | MTOP: Prediction of membrane topology (Hartmann et al.) | | | |
| | Center position for calculation: 9 | | | |
| | Charge difference: 0.0 C(1.0)-N(1.0) | | | |
| | N >= C: N-terminal side will be inside | | | |
| | MITDISC: discrimination of mitochondrial targeting seq | | | |
| | R content: | 2 | Hyd Moment(75): | 1.56 |
| | Hyd Moment(95): | 3.50 | G content: | 5 |
| | D/E content: | 1 | S/T content: | 7 |

Score: −4.38
Gavel: prediction of cleavage sites for mitochondrial preseq
R-2 motif at 67 CRN|YV
NUCDISC: discrimination of nuclear localization signals
pat4: none
pat7: none
bipartite: none
content of basic residues: 12.5%
NLS Score: −0.47
KDEL: ER retention motif in the C-terminus: none
ER Membrane Retention Signals: none
SKL: peroxisomal targeting signal in the C-terminus: none
PTS2: 2nd peroxisomal targeting signal: none
VAC: possible vacuolar targeting motif: none
RNA-binding motif: none
Actinin-type actin-binding motif:
type 1: none
type 2: none
NMYR: N-myristoylation pattern: none
Prenylation motif: none
memYQRL: transport motif from cell surface to Golgi: none
Tyrosines in the tail: none
Dileucine motif in the tail: none
checking 63 PROSITE DNA binding motifs: none
checking 71 PROSITE ribosomal protein motifs: none
checking 33 PROSITE prokaryotic DNA binding motifs: none
NNCN: Reinhardt's method for Cytoplasmic/Nuclear discrimination
Prediction: cytoplasmic
Reliability: 55.5
COIL: Lupas's algorithm to detect coiled-coil regions
total: 0 residues
Final Results (k = 9/23):
33.3%: extracellular, including cell wall
33.3%: mitochondrial
11.1%: Golgi
11.1%: vacuolar
11.1%: endoplasmic reticulum
>> prediction for CG54611-06 is exc (k = 9)

[0333] A search of the NOV5a protein against the Geneseq database, a proprietary database that contains sequences published in patents and patent publication, yielded several homologous proteins shown in Table 5D.

TABLE 5D
Geneseq Results for NOV5a

| | | | Identities/ | |
|---|---|---|---|---|
| | | | Similarities for | |
| Geneseq | Protein/Organism/Length | NOV5a Residues/ | the Matched | Expect |
| Identifier | [Patent #, Date] | Match Residues | Region | Value |
| ABG60222 | Human Wnt-like protein NOV1b - | 1 . . . 352 | 352/352 (100%) | 0.0 |
| | Homo sapiens, 352 aa. | 1 . . . 352 | 352/352 (100%) | |
| | [WO200224733-A2, 28 MAR. | | | |
| | 2002] | | | |
| ABG60221 | Human Wnt-like protein NOV1a - | 1 . . . 352 | 352/352 (100%) | 0.0 |
| | Homo sapiens, 352 aa. | 1 . . . 352 | 352/352 (100%) | |
| | [WO200224733-A2, 28 MAR. | | | |
| | 2002] | | | |
| AAU96847 | Human NOV1b protein variant - | 1 . . . 352 | 350/352 (99%) | 0.0 |
| | Homo sapiens, 352 aa. | 1 . . . 352 | 350/352 (99%) | |
| | [WO200224733-A2, 28 MAR. | | | |
| | 2002] | | | |
| AAU96846 | Human Wnt-like protein NOV1a | 1 . . . 352 | 348/352 (98%) | 0.0 |
| | variant - Homo sapiens, 352 aa. | 1 . . . 352 | 348/352 (98%) | |
| | [WO200224733-A2, 28 MAR. | | | |
| | 2002] | | | |
| AAY57596 | Murine Wnt-3a protein - Mus sp, | 1 . . . 352 | 338/352 (96%) | 0.0 |
| | 352 aa. [WO9957248-A1, 11 | 1 . . . 352 | 344/352 (97%) | |
| | NOV. 1999] | | | |

[0334] In a BLAST search of public sequence databases, the NOV5a protein was found to have homology to the proteins shown in the BLASTP data in Table 6E.

TABLE 5E
Public BLASTP Results for NOV5a

| | | | Identities/ | |
|---|---|---|---|---|
| Protein | | | Similarities for | |
| Accession | | NOV5a Residues/ | the Matched | Expect |
| Number | Protein/Organism/Length | Match Residues | Portion | Value |
| P56704 | Wnt-3a protein precursor - Homo | 1 . . . 352 | 352/352 (100%) | 0.0 |
| | sapiens (Human), 352 aa. | 1 . . . 352 | 352/352 (100%) | |
| P27467 | Wnt-3a protein precursor - Mus | 1 . . . 352 | 338/352 (96%) | 0.0 |
| | musculus (Mouse), 352 aa. | 1 . . . 352 | 344/352 (97%) | |
| P31285 | Wnt-3a protein precursor (XWnt- | 1 . . . 352 | 296/352 (84%) | 0.0 |
| | 3a) - Xenopus laevis (African | 1 . . . 352 | 321/352 (91%) | |
| | clawed frog), 352 aa. | | | |
| P56703 | Wnt-3 proto-oncogene protein | 4 . . . 352 | 297/350 (84%) | 0.0 |
| | precursor - Homo sapiens | 6 . . . 355 | 319/350 (90%) | |
| | (Human), 355 aa. | | | |
| P17553 | Wnt-3 proto-oncogene protein | 4 . . . 352 | 298/350 (85%) | 0.0 |
| | precursor - Mus musculus | 6 . . . 355 | 318/350 (90%) | |
| | (Mouse), 355 aa. | | | |

[0335] PFam analysis predicts that the NOV5a protein contains the domains shown in the Table 5F.

TABLE 5F
Domain Analysis of NOV5a

| | | Identities/ | |
|---|---|---|---|
| | | Similarities | |
| | NOV5a Match | for the | Expect |
| Pfam Domain | Region | Matched Region | Value |
| wnt | 41 . . . 352 | 184/352 (52%) | 2e−220 |
| | | 293/352 (83%) | |

### Example 6

[0336] The NOV6 clone was analyzed, and the nucleotide and encoded polypeptide sequences are shown in Table 6A.

TABLE 6A

NOV6 Sequence Analysis

| | | |
|---|---|---|
| NOV6a, CG92035-02 | SEQ ID NO: 193 | 795 bp |
| DNA Sequence | ORF Start: at 28 | ORF Stop: TGA at 784 |

GGTGTGGTGATGCTGCTGGTGCTGGTGGTGCTCATCCCCGTGCTGGTGAGCTCGGGCGGCCCGGAAGG
CCACTATGAGATGCTGGGCACCTGCCGCATGGTGTGCGACCCCTACCCCGCGCGGGGCCCCGGCGCCG
GCGCGCGGACCGACGGCGGCGACGCCCTGAGCGAGCAGAGCGGCGCGCCCCCGCCTTCCACGCTGGTG
CAGGGCCCCCAGGGGAAGCCGGGCCGCACCGGCAAGCCCGGCCCTCCGGGGCCTCCCGGGGACCCAGG
TCCTCCCGGCCCTGTGGGGCCGCCGGGGGAGAAGGGTGAGCCAGGCAAGCCCGGCCCTCCGGGGCTGC
CGGGCGCGGGGCGCAGCGGCGCCATCAGCACTGCCACCTACACCACGGTGCCGCGCGTGGCCTTCTAC
GCCGGCCTCAAGAACCCCCACGAGGGTTACGAGGTACTCAAGTTTGACGACGTGGTCACCAACCTAGG
CAACAACTACGACGCGGCCAGCGGCAAGTTAACGTGCAACATTCCCGGCACCTACTTTTTCACCTACC
ATGTCCTCATGCGCGGCGGCGACGGCACCAGTATGTGGGCAGACCTCTGCAAGAATGGCCAGGTGCGG
GCCAGTGCTATTCCCCAGGACGCGGACCAGAACTACGACTACGCCAGCAACAGCGTGATCCTGCACCT
GGACGCCGGCGACGAGGTCTTCATCAAGCTGGATGGAGGCAAAGCACACGGCGGCAACAGCAACAAAT
ACAGCACCTTCTCTGGCTTCATCATCTACTCCGACTGAGCTCCCCAC

| | | | |
|---|---|---|---|
| NOV6a, CG92035-02 | | | |
| Protein Sequence | SEQ ID NO: 194 | 252 aa | MW at 25749.4kD |

VLIPVLVSSGGPEGHYEMLGTCRMVCDPYPARGPGAGARTDGGDALSEQSGAPPPSTLVQGPQGKPGR
TGKPGPPGPPGDPGPPGPVGPPGEKGEPGKPGPPGLPGAGGSGAISTATYTTVPRVAFYAGLKNPHEG
YEVLKFDDVVTNLGNNYDAASGKLTCNIPGTYFFTYHVLMRGGDGTSMWADLCKNGQVRASAIAQDAD
QNYDYASNSVILHLDAGDEVFIKLDGGKAHGGNSNKYSTFSGFIIYSD

| | | |
|---|---|---|
| NOV6b, 214458541 | SEQ ID NO: 195 | 387 bp |
| DNA Sequence | ORF Start: at 1 | ORF Stop: end of sequence |

GGATCCGCCTTCTACGCCGGCCTCAAGAACCCCCACGAGGGTTACGAGGTACTCAAGTTTGACGACGT
GGTCACCAACCTAGGTAACAACTACGACGCGGCCAGCGGCGAGTTTACGTGCAACATTCCCGGCACCT
ACTTTTTCACCTACCATCTCCTCATGCGCGGCGGCGACGGCACCAGTATGTGGGCAGACCTCTGCAAG
AATGGCCAGGTGCGGGCCAGTGCTATTGCCCAGGACGCGGACCAGAACTACGACTACGCCAGCAGCAG
CGTGATCCTGCACCTGGACGCCGGTGACGAGGTCTTCATCAAGCTGGATGGAGGCAAAGCACACGGCG
GCAACAGCAACAAATACAGCACGTTCTCTGGCTTCATCATCCTCGAG

| | | | |
|---|---|---|---|
| NOV6b, 214458541 | | | |
| Protein Sequence | SEQ ID NO: 196 | 129 aa | MW at 13937.2kD |

GSAFYAGLKNPHEGYEVLKFDDVVTNLGNNYDAASGEFTCNIPGTYFFTYHVLMRGGDGTSMWADLCK
NGQVRASAIAQDADQNYDYASSSVILHLDAGDEVFIKLDGGKAHGGNSNKYSTFSGFIILE

| | | |
|---|---|---|
| NOV6c, 214458545 | SEQ ID NO: 197 | 1387 bp |
| DNA Sequence | ORF Start: at 1 | ORF Stop: end of sequence |

GGATCCGCCTTCTACGCCGGCCTCAAGAACCCCCACGAGGGTTACGAGGTACTCAAGTTTGACGACGT
GGTCACCAACCTAGGCAACAACTACGACGCGGCCAGCGGCAAGTTTACGTGCAACATTCCCGGCACCT
ACTTTTTCACCTACCATGTCCTCATGCGCGGCGGCGACGGCACCAGTATGTGGGCAGACCTCTGCAAG
AATGGCCAGGTGCGGGCCAGTGCTATTGCCCAGGACGCGGACCAGAACTACGACTACGCCAGCAACAG
CGTGATCATGCACCTGGACGCCGGCGACGAGGTCTTCATCAAGCTGGATGGAGGCAAAGCACACGGCG
GCAACAGCAACAAATACACCACGTTCTCTGGCTTCATCATCCTCGAG

| | | | |
|---|---|---|---|
| NOV6c, 214458545 | | | |
| Protein Sequence | SEQ ID NO: 198 | 129 aa | MW at 13981.3kD |

GSAFYAGLKNPHEGYEVLKFDDVVTNLGNNYDAASGKFTCNIPGTYFFTYHVLMRGGDGTSMWADLCK
NGQVRASAIAQDADQNYDYASNSVIMHLDAGDEVFIKLDGGKAHGGNSNKYSTFSGFIILE

| | | |
|---|---|---|
| NOV6d, 214458564 | SEQ ID NO: 199 | 387 bp |
| DNA Sequence | ORF Start: at 1 | ORF Stop: end of sequence |

GCATCCGCCTTCTACGCCGGCCTCAACAACCCCCACCAGGGTTCCCAGGTACTCAAGTTTGACGACGT
GGTCACCAACCTAGGCAACAACTACGACGCGGCCAGCGGCAACTTTACGTGCAACATTCCCGGCACCT
ACTTTTTCACCTACCATGTCCTCATGCGCGGCGGCGACGGCACCAGTATGTGGGCAGACCTCTGCAAG
AATGGCCAGGTGCGGGCCAGTGCTATTGCCCAGCACGCGGACCAGAACTACGACTACGCCAGCAACAG
CGTGATCCTGCACCTCGACGCCGGCGACGAGGTCTTCATCAAGCTGGATGGAGGCAAAGCACACGCCG
GCAACAGCAACAAATACAGCACGTTCTCTGGCTTCATCATCCTCGAG

| | | | |
|---|---|---|---|
| NOV6d, 214458564 | | | |
| Protein Sequence | SEQ ID NO: 200 | 129 aa | MW at 13887.2kD |

GSAFYAGLKNPHEGSEVLKFDDVVTNLGNNYDAASGKFTCNIPGTYFFTYHVLMRGGDGTSMWADLCK
NGQVRASAIAQDADQNYDYASNSVILHLDAGDEVFIKLDGGKAHGGNSNKYSTFSGFIILE

| | | |
|---|---|---|
| NOV6e, CG92035-01 | SEQ ID NO: 201 | 813 bp |
| DNA Sequence | ORF Start: ATG at 28 | ORF Stop: TGA at 802 |

GCGGCGGCGGCCGCCGCGGGTGTGGTGATGCTGCTGGTGCTGGTGGTGCTCATCCCCGTGCTGGTGAG
CTCGGGCGGCCCGGAAGGCCACTATGAGATGCTGGGCACCTGCCGCATGGTGTGCGACCCCTACCCCG
CGCGGGGCCCCGCCGCCGGCGCGCGGACCGACGGCGGCGACGCCCTGAGCGAGCAGAGCGGCGCGCCC
CCGCCTTCCACGCTGGTGCAGGGCCCCCAGGGGAAGCCGGGCCGCACCGCCAAGCCCGGCCCTCCGGG
GCCTCCCGGGGACCCAGGTCCTCCCGGCCCTGTGGGGCCGCCGGGGGAGAAGGGTGAGCCAGGCAAGC
CGGGCCCTCCGGGGCTGCCGGGCGCGGGGGGCAGCGGCGCCATCAGCACTGCCACCTACACCACGGTG
CCGCGCGTGGCCTTCTACGCCGGCCTCAAGAACCCCCACGAGGGTTACGAGGTACTCAAGTTTGACGA
CGTGGTCACCACCTAGGCAACAACTACGACGCGGCCAGCGGCAAGTTAACGTGCAACATTCCCGGCA
CCTACTTTTTCACCTACCATGTCCTCATGCGCGGCGGCGACGGCACCAGTATGTGGGCAGACCTCTGC
AAGAATGGCCAGGTGCGGGCCAGTGCTATTGCCCAGGACGCGGACCAGAACTACGACTACGCCAGCAA
CAGCGTGATCCTGCACCTCGACGCCGGCGACGAGGTCTTCATCAAGCTGGATGGAGGCAAAGCACACG
GCGGCAACAGCAACAAATACACCACGTTCTCTGGCTTCATCATCTACTCCGACTGAGCTCCCCAC

| | | | |
|---|---|---|---|
| NOV6e, CG92035-01 | | | |
| Protein Sequence | SEQ ID NO: 202 | 258 aa | MW at 26418.3kD |

MLLVLVVLIPVLVSSGGPEGHYEMLGTCRMVCDPYPARCPGAGARTDGGDALSEQSGAPPPSTLVQGP
QGKPGRTGKPGPPGPPGDPGPPGPVGPPGEKCEPGKPGPPGLPGAGGSCAISTATYTTVPRVAFYAGL
KNPHEGYEVLKFDDVVTNLGNNYDAASGKLTCNIPGTYFFTYHVLMRGGDGTSMWADLCKNGQVPASA
IAQDADQNYDYASNSVILHLDAGDEVFIKLDGGKAHGGNSNKYSTFSGFIIYSD

| | | |
|---|---|---|
| NOV6f, CG92035-03 | SEQ ID NO: 203 | 387 bp |
| DNA Sequence | ORF Start: at 7 | ORF Stop: at 382 |

GGATCCGCCTTCTACGCCGGCCTCAAGAACCCCCACGAGGGTTACGAGGTACTCAACTTTGACGACGT
GGTCACCAACCTAGGCAACAACTACGACGCCGCCAGCGGCAAGTTTACGTGCAACATTCCCGGCACCT
ACTTTTTCACCTACGATGTCCTCATGCGCGGCGGCGACGGCACCAGTATGTGGGCAGACCTCTGCAAG
AATGGCCAGGTGCGGGCCAGTGCTATTGCCCAGGACGCGGACCAGAACTACGACTACGCCAGCAACAG
CGTGATCCTGCACCTGGACGCCGGTGACGAGGTCTTCATCAAGCTGGATGGAGGCAAAGCACACGGCG
GCAACAGCAACAAATACAGCACGTTCTCTGGCTTCATCATCCTCGAG

| | | | |
|---|---|---|---|
| NOV6f, CG92035-03 | | | |
| Protein Sequence | SEQ ID NO: 204 | 125 aa | MW at 13576.9kD |

AFYAGLKNPHEGYEVLKFDDVVTNLGNNYDAASGKFTCNIPGTYFFTYHVLMRGGDGTSMWADLCKNG
QVRASAIAQDADQNYDYASNSVILHLDAGDEVFIKLDGGKAHGGNSNKYSTFSGFII

[0337] A ClustalW comparison of the above protein sequences yields the following sequence alignment shown in Table 6B.

TABLE 7B
Comparison of the NOV6 protein sequences.

| | |
|---|---|
| NOV6a | ------VLIPVLVSSGGPEGHYEMLGTCRMVCDPYPARGPGAGARTDGGDALSEQSGAPP |
| NOV6b | ------------------------------------------------------------ |
| NOV6c | ------------------------------------------------------------ |
| NOV6d | ------------------------------------------------------------ |
| NOV6e | MLLVLVVLIPVLVSSGGPEGHYEMLGTCRMVCDPYPARGPGAGARTDGGDALSEQSGAPP |
| NOV6f | ------------------------------------------------------------ |
| NOV6a | PSTLVQGPQGKPGRTGKPGPPGPPGDPGPPGPVGPPGEKGEPGKPGPPGLPGAGGSGAIS |
| NOV6b | ------------------------------------------------------------ |
| NOV6c | ------------------------------------------------------------ |
| NOV6d | ------------------------------------------------------------ |
| NOV6e | PSTLVQGPQGKPGRTGKPGPPGPPGDPGPPGPVGPPGEKGEPGKPGPPGLPGAGGSGAIS |
| NOV6f | ------------------------------------------------------------ |
| NOV6a | TATYTTVPRVAFYAGLKNPHEGYEVLKFDDVVTNLGNNYDAASGKLTCNIPGTYFFTYHV |
| NOV6b | --------GSAFYAGLKNPHEGYEVLKFDDVVTNLGNNYDAASGKLTCNIPGTYFFTYHV |
| N0V6c | --------GSAFYAGLKNPHEGYEVLKFDDVVTNLGNNYDAASGKLTCNIPGTYFFTYHV |
| NOV6d | --------GSAFYAGLKNPHEGYEVLKFDDVVTNLGNNYDAASGKLTCNIPGTYFFTYHV |
| NOV6e | TATYTTVPRVAFYAGLKNPHEGYEVLKFDDVVTNLGNNYDAASGKLTCNIPGTYFFTYHV |
| NOV6f | ----------AFYAGLKNPHEGYEVLKFDDVVTNLGNNYDAASGKLTCNIPGTYFFTYHV |
| NOV6a | LMRGGDGTSMWADLCKNGQVRASAIAQDADQNYDYASNSVILHLDAGDEVFIKLDGGKAH |
| NOV6b | LMRGGDGTSMWADLCKNGQVRASAIAQDADQNYDYASNSVILHLDAGDEVFIKLDGGKAH |
| NOV6c | LMRGGDGTSMWADLCKNGQVRASAIAQDADQNYDYASNSVILHLDAGDEVFIKLDGGKAH |
| NOV6d | LMRGGDGTSMWADLCKNGQVRASAIAQDADQNYDYASNSVILHLDAGDEVFIKLDGGKAH |
| NOV6e | LMRGGDGTSMWADLCKNGQVRASAIAQDADQNYDYASNSVILHLDAGDEVFIKLDGGKAH |
| NOV6f | LMRGGDGTSMWADLCKNGQVRASAIAQDADQNYDYASNSVILHLDAGDEVFIKLDGGKAH |
| NOV6a | GGNSNKYSTFSGFIIYSD |
| NOV6b | GGNSNKYSTFSGFIILE- |
| NOV6c | GGNSNKYSTFSGFIILE- |
| NOV6d | GGNSNKYSTFSGFIILE- |
| NOV6e | GGNSNKYSTFSGFIIYSD |
| NOV6f | GGNSNKYSTFSGFII--- |
| NOV6a | (SEQ ID NO: 194) |
| NOV6b | (SEQ ID NO: 196) |
| NOV6c | (SEQ ID NO: 198) |
| NOV6d | (SEQ ID NO: 200) |
| NOV6e | (SEQ ID NO: 202) |
| NOV6f | (SEQ ID NO: 204) |

[0338] Further analysis of the NOV6a protein yielded the following properties shown in Table 6C.

TABLE 6C
Protein Sequence Properties NOV6a

| SignalP analysis: | No Known Signal Sequence Predicted | | | |
|---|---|---|---|---|
| PSORT II | PSG: a new signal peptide prediction method | | | |
| analysis: | N-region: length 0; pos.chg 0; neg.chg 0 | | | |
| | H-region: length 12; peak value 8.85 | | | |
| | PSG score: 4.45 | | | |
| | GvH: von Heijne's method for signal seq. recognition | | | |
| | GvH score (threshold: −2.1): −5.49 | | | |
| | possible cleavage site: between 14 and 15 | | | |
| | >>> Seems to have no N-terminal signal peptide | | | |
| | ALOM: Klein et al's method for TM region allocation | | | |
| | Init position for calculation: 1 | | | |
| | Tentative number of TMS(s) for the threshold 0.5: 0 | | | |
| | number of TMS(s) . . . fixed | | | |
| | PERIPHERAL Likelihood = 7.43 (at 160) | | | |
| | ALOM score: 7.43 (number of TMSs: 0) | | | |
| | MTOP: Prediction of membrane topology (Hartmann et al.) | | | |
| | Center position for calculation: 6 | | | |
| | Charge difference: −2.5 C(−1.5)-N(1.0) | | | |
| | N >= C: N-terminal side will be inside | | | |
| | MITDISC: discrimination of mitochondrial targeting seq | | | |
| | R content: | 0 | Hyd Moment (75): | 3.67 |
| | Hyd Moment (95): | 2.25 | G content: | 3 |
| | D/E content: | 2 | S/T content: | 2 |

```
Score: −8.66
Gavel: prediction of cleavage sites for mitochondrial preseq
cleavage site motif not found
NUCDISC: discrimination of nuclear localization signals
pat4: none
pat7: none
bipartite: none
content of basic residues: 7.1%
NLS Score: −0.47
KDEL: ER retention motif in the C-terminus: none
ER Membrane Retention Signals: none
SKL: peroxisomal targeting signal in the C-terminus: none
PTS2: 2nd peroxisomal targeting signal: none
VAC: possible vacuolar targeting motif: none
RNA-binding motif: none
Actinin-type actin-binding motif:
type 1: none
type 2: none
NMYR: N-myristoylation pattern: none
Prenylation motif: none
memYQRL: transport motif from cell surface to Golgi: none
Tyrosines in the tail: none
Dileucine motif in the tail: none
checking 63 PROSITE DNA binding motifs: none
checking 71 PROSITE ribosomal protein motifs: none
checking 33 PROSITE prokaryotic DNA binding motifs: none
NNCN: Reinhardt's method for Cytoplasmic/Nuclear discrimination
Prediction: cytoplasmic
Reliability: 70.6
COIL: Lupas's algorithm to detect coiled-coil regions
total: 0 residues
Final Results (k = 9/23):
43.5%: cytoplasmic
34.8%: nuclear
13.0%: mitochondrial
  4.3%: extracellular, including cell wall
  4.3%: vacuolar
>> prediction for CG92035-02 is cyt (k = 23)
```

[0339] A search of the NOV6a protein against the Geneseq database, a proprietary database that contains sequences published in patents and patent publication, yielded several homologous proteins shown in Table 6D.

TABLE 6D
Geneseq Results for NOV6a

| | | | Identities/ | |
|---|---|---|---|---|
| | | | Similarities for | |
| Geneseq | Protein/Organism/Length [Patent | NOV6a Residues/ | the Matched | Expect |
| Identifier | #, Date] | Match Residues | Region | Value |
| ABG79646 | Human novel secreted protein | 1 . . . 252 | 194/256 (75%) | e−114 |
| | SECP22, Incyte ID No. | 7 . . . 255 | 213/256 (82%) | |
| | 5960119CD1 - Homo sapiens, 255 | | | |
| | aa. [WO200262841-A2, 15 AUG. | | | |
| | 2002] | | | |
| AAG64212 | Murine HSP47 interacting protein, | 1 . . . 252 | 190/256 (74%) | e−111 |
| | #2 - Mus sp, 255 aa. | 7 . . . 255 | 209/256 (81%) | |
| | [JP2001145493-A, 29 MAY 2001] | | | |
| ABB53290 | Human polypeptide #30 - Homo | 1 . . . 252 | 188/256 (73%) | e−110 |
| | sapiens, 255 aa. [WO200181363- | 7 . . . 255 | 208/256 (80%) | |
| | A1, 01 NOV. 2001] | | | |
| AAU09865 | Novel human secreted protein #6 - | 1 . . . 252 | 176/282 (62%) | e−101 |
| | Homo sapiens, 287 aa. | 7 . . . 287 | 207/282 (72%) | |
| | [WO200179454-A1, 25 OCT. 2001] | | | |
| ABG69646 | Human secreted protein SCEP-26 - | 1 . . . 252 | 176/282 (62%) | e−101 |
| | Homo sapiens, 287 aa. | 7 . . . 287 | 207/282 (72%) | |
| | [WO200248337-A2, 20 JUN. 2002] | | | |

[0340] In a BLAST search of public sequence databases, the NOV6a protein was found to have homology to the proteins shown in the BLASTP data in Table 6E.

TABLE 6E
Public BLASTP Results for NOV6a

| | | | Identities/ | |
|---|---|---|---|---|
| Protein | | | Similarities for | |
| Accession | | NOV6a Residues/ | the Matched | Expect |
| Number | Protein/Organism/Length | Match Residues | Portion | Value |
| O75973 | C1q-related factor precursor - | 1 . . . 252 | 251/252 (99%) | e−153 |
| | Homo sapiens (Human), 258 aa. | 7 . . . 258 | 251/252 (99%) | |
| O88992 | C1q-related factor precursor - Mus | 1 . . . 252 | 246/252 (97%) | e−150 |
| | musculus (Mouse), 258 aa. | 7 . . . 258 | 250/252 (98%) | |
| Q9ESN4 | Gliacolin precursor (C1q-like | 1 . . . 252 | 190/256 (74%) | e−111 |
| | protein) - Mus musculus (Mouse), | 7 . . . 255 | 209/256 (81%) | |
| | 255 aa. | | | |
| Q7ZZ82 | SI: dZ63M2.2 (Novel protein similar | 1 . . . 245 | 177/247 (71%) | e−103 |
| | to human gliacolin) - Brachydanio | 7 . . . 250 | 202/247 (81%) | |
| | rerio (Zebrafish) (Danio rerio), 250 | | | |
| | aa (fragment). | | | |
| Q8CFRO | Similar to C1q-like - Mus musculus | 1 . . . 252 | 176/282 (62%) | e−100 |
| | (Mouse), 287 aa. | 7 . . . 287 | 207/282 (72%) | |

[0341] PFam analysis predicts that the NOV6a protein contains the domains shown in the Table 6F.

TABLE 6F
Domain Analysis of NOV6a

| | | Identities/ | |
|---|---|---|---|
| | | Similarities | |
| | NOV6a Match | for the | Expect |
| Pfam Domain | Region | Matched Region | Value |
| Collagen | 59 . . . 117 | 34/60 (57%) | 0.00022 |
| | | 42/60 (70%) | |
| C1q | 125 . . . 249 | 42/140 (30%) | 4.7e−27 |
| | | 91/140 (65%) | |

### Example B

### Sequencing Methodology and Identification of NOVX Clones

[0342] 1. GeneCalling™ Technology: This is a proprietary method of performing differential gene expression profiling between two or more samples developed at CuraGen and described by Shimkets, et al., “Gene expression analysis by transcript profiling coupled to a gene database query” Nature Biotechnology 17:198-803 (1999). cDNA was derived from various human samples representing multiple tissue types, normal and diseased states, physiological states, and developmental states from different donors. Samples were obtained as whole tissue, primary cells or tissue cultured primary cells or cell lines. Cells and cell lines may have been treated with biological or chemical agents that regulate gene expression, for example, growth factors, chemokines or steroids. The cDNA thus derived was then digested with up to as many as 120 pairs of restriction enzymes and pairs of linker-adaptors specific for each pair of restriction enzymes were ligated to the appropriate end. The restriction digestion generates a mixture of unique cDNA gene fragments. Limited PCR amplification is performed with primers homologous to the linker adapter sequence where one primer is biotinylated and the other is fluorescently labeled. The doubly labeled material is isolated and the fluorescently labeled single strand is resolved by capillary gel electrophoresis. A computer algorithm compares the electropherograms from an experimental and control group for each of the restriction digestions. This and additional sequence-derived information is used to predict the identity of each differentially expressed gene fragment using a variety of genetic databases. The identity of the gene fragment is confirmed by additional, gene-specific competitive PCR or by isolation and sequencing of the gene fragment.

[0343] 2. SeqCalling™ Technology: cDNA was derived from various human samples representing multiple tissue types, normal and diseased states, physiological states, and developmental states from different donors. Samples were obtained as whole tissue, primary cells or tissue cultured primary cells or cell lines. Cells and cell lines may have been treated with biological or chemical agents that regulate gene expression, for example, growth factors, chemokines or steroids. The cDNA thus derived was then sequenced using CuraGen's proprietary SeqCalling technology. Sequence traces were evaluated manually and edited for corrections if appropriate. cDNA sequences from all samples were assembled together, sometimes including public human sequences, using bioinformatic programs to produce a consensus sequence for each assembly. Each assembly is included in CuraGen Corporation's database. Sequences were included as components for assembly when the extent of identity with another component was at least 95% over 50 bp. Each assembly represents a gene or portion thereof and includes information on variants, such as splice forms single nucleotide polymorphisms (SNPs), insertions, deletions and other sequence variations.

[0344] 3. PathCalling™ Technology: The NOVX nucleic acid sequences are derived by laboratory screening of cDNA library by the two-hybrid approach. cDNA fragments covering either the full length of the DNA sequence, or part of the sequence, or both, are sequenced. In silico prediction was based on sequences available in CuraGen Corporation's proprietary sequence databases or in the public human sequence databases, and provided either the full length DNA sequence, or some portion thereof. The laboratory screening was performed using the methods summarized below:

[0345] cDNA libraries were derived from various human samples representing multiple tissue types, normal and diseased states, physiological states, and developmental states from different donors. Samples were obtained as whole tissue, primary cells or tissue cultured primary cells or cell lines. Cells and cell lines may have been treated with biological or chemical agents that regulate gene expression, for example, growth factors, chemokines or steroids. The cDNA thus derived was then directionally cloned into the appropriate two-hybrid vector (Gal4-activation domain (Gal4-AD) fusion). Such cDNA libraries as well as commercially available cDNA libraries from Clontech (Palo Alto, Calif.) were then transferred from E. coli into a CuraGen Corporation proprietary yeast strain (disclosed in U.S. Pat. Nos. 6,057,101 and 6,083,693, incorporated herein by reference in their entireties).

[0346] Gal4-binding domain (Gal4-BD) fusions of a CuraGen Corporation proprietary library of human sequences was used to screen multiple Gal4-AD fusion cDNA libraries resulting in the selection of yeast hybrid diploids in each of which the Gal4-AD fusion contains an individual cDNA. Each sample was amplified using the polymerase chain reaction (PCR) using non-specific primers at the cDNA insert boundaries. Such PCR product was sequenced; sequence traces were evaluated manually and edited for corrections if appropriate. cDNA sequences from all samples were assembled together, sometimes including public human sequences, using bioinformatic programs to produce a consensus sequence for each assembly. Each assembly is included in CuraGen Corporation's database. Sequences were included as components for assembly when the extent of identity with another component was at least 95% over 50 bp. Each assembly represents a gene or portion thereof and includes information on variants, such as splice forms single nucleotide polymorphisms (SNPs), insertions, deletions and other sequence variations.

[0347] Physical clone: the cDNA fragment derived by the screening procedure, covering the entire open reading frame is, as a recombinant DNA, cloned into pACT2 plasmid (Clontech) used to make the cDNA library. The recombinant plasmid is inserted into the host and selected by the yeast hybrid diploid generated during the screening procedure by the mating of both CuraGen Corporation proprietary yeast strains N106′ and YULH (U.S. Pat. Nos. 6,057,101 and 6,083,693).

[0348] 4. RACE: Techniques based on the polymerase chain reaction such as rapid amplification of cDNA ends (RACE), were used to isolate or complete the predicted sequence of the cDNA of the invention. Usually multiple clones were sequenced from one or more human samples to derive the sequences for fragments. Various human tissue samples from different donors were used for the RACE reaction. The sequences derived from these procedures were included in the SeqCalling Assembly process described in preceding paragraphs.

[0349] 5. Exon Linking: The NOVX target sequences identified in the present invention were subjected to the exon linking process to confirm the sequence. PCR primers were designed by starting at the most upstream sequence available, for the forward primer, and at the most downstream sequence available for the reverse primer. In each case, the sequence was examined, walking inward from the respective termini toward the coding sequence, until a suitable sequence that is either unique or highly selective was encountered, or, in the case of the reverse primer, until the stop codon was reached. Such primers were designed based on in silico predictions for the full length cDNA, part (one or more exons) of the DNA or protein sequence of the target sequence, or by translated homology of the predicted exons to closely related human sequences from other species. These primers were then employed in PCR amplification based on the following pool of human cDNAs: adrenal gland, bone marrow, brain—amygdala, brain—cerebellum, brain—hippocampus, brain—substantia nigra, brain—thalamus, brain -whole, fetal brain, fetal kidney, fetal liver, fetal lung, heart, kidney, lymphoma—Raji, mammary gland, pancreas, pituitary gland, placenta, prostate, salivary gland, skeletal muscle, small intestine, spinal cord, spleen, stomach, testis, thyroid, trachea, uterus. Usually the resulting amplicons were gel purified, cloned and sequenced to high redundancy. The PCR product derived from exon linking was cloned into the pCR2.1 vector from Invitrogen. The resulting bacterial clone has an insert covering the entire open reading frame cloned into the pCR2.1 vector. The resulting sequences from all clones were assembled with themselves, with other fragments in CuraGen Corporation's database and with public ESTs. Fragments and ESTs were included as components for an assembly when the extent of their identity with another component of the assembly was at least 95% over 50 bp. In addition, sequence traces were evaluated manually and edited for corrections if appropriate. These procedures provide the sequence reported herein.

[0350] 6. Physical Clone: Exons were predicted by homology and the intron/exon boundaries were determined using standard genetic rules. Exons were further selected and refined by means of similarity determination using multiple BLAST (for example, tBlastN, BlastX, and BlastN) searches, and, in some instances, GeneScan and Grail. Expressed sequences from both public and proprietary databases were also added when available to further define and complete the gene sequence. The DNA sequence was then manually corrected for apparent inconsistencies thereby obtaining the sequences encoding the full-length protein.

[0351] The PCR product derived by exon linking, covering the entire open reading frame, was cloned into the pCR2.1 vector from Invitrogen to provide clones used for expression and screening purposes.

### Example C

### Quantitative Expression Analysis of Clones in Various Cells and Tissues

[0352] The quantitative expression of various NOV genes was assessed using microtiter plates containing RNA samples from a variety of normal and pathology-derived cells, cell lines and tissues using real time quantitative PCR (RTQ-PCR) performed on an Applied Biosystems (Foster City, Calif.) ABI PRISM® 7700 or an ABI PRISM® 7900 HT Sequence Detection System.

[0353] RNA integrity of all samples was determined by visual assessment of agarose gel electropherograms using 28S and 18S ribosomal RNA staining intensity ratio as a guide (2:1 to 2.5:1 28s:18s) and the absence of low molecular weight RNAs (degradation products). Control samples to detect genomic DNA contamination included RTQ-PCR reactions run in the absence of reverse transcriptase using probe and primer sets designed to amplify across the span of a single exon.

[0354] RNA samples were normalized in reference to nucleic acids encoding constitutively expressed genes (i.e., β-actin and GAPDH). Alternatively, non-normalized RNA samples were converted to single strand cDNA (sscDNA) using Superscript II (Invitrogen Corporation, Carlsbad, Calif., Catalog No. 18064-147) and random hexamers according to the manufacturer's instructions. Reactions containing up to 10 μg of total RNA in a volume of 20 μl or were scaled up to contain 50 μg of total RNA in a volume of 100 μl and were incubated for 60 minutes at 42° C. sscDNA samples were then normalized in reference to nucleic acids as described above.

[0355] Probes and primers were designed according to Applied Biosystems Primer

[0356] Express Software package (version I for Apple Computer's Macintosh Power PC) or a similar algorithm using the target sequence as input. Default reaction condition settings and the following parameters were set before selecting primers: 250 nM primer concentration; 58°-60° C. primer melting temperature (Tm) range; 59° C. primer optimal Tm; 2° C. maximum primer difference (if probe does not have 5′ G, probe Tm must be 10° C. greater than primer Tm; and 75 bp to 100 bp amplicon size. The selected probes and primers were synthesized by Synthegen (Houston, Tex.). Probes were double purified by HPLC to remove uncoupled dye and evaluated by mass spectroscopy to verify coupling of reporter and quencher dyes to the 5′ and 3′ ends of the probe, respectively. Their final concentrations were: 900 nM forward and reverse primers, and 200 nM probe.

[0357] Normalized RNA was spotted in individual wells of a 96 or 384-well PCR plate (Applied Biosystems, Foster City, Calif.). PCR cocktails included a single gene-specific probe and primers set or two multiplexed probe and primers sets. PCR reactions were done using TaqMan® One-Step RT-PCR Master Mix (Applied Biosystems, Catalog No. 4313803) following manufacturer's instructions. Reverse transcription was performed at 48° C. for 30 minutes followed by amplification/PCR cycles: 95° C. 10 min, then 40 cycles at 95° C. for 15 seconds, followed by 60° C. for 1 minute. Results were recorded as CT values (cycle at which a given sample crosses a threshold level of fluorescence) and plotted using a log scale, with the difference in RNA concentration between a given sample and the sample with the lowest CT value being represented as 2 to the power of delta CT. The percent relative expression was the reciprocal of the RNA difference multiplied by 100. CT values below 28 indicate high expression, between 28 and 32 indicate moderate expression, between 32 and 35 indicate low expression and above 35 reflect levels of expression that were too low to be measured reliably.

[0358] Normalized sscDNA was analyzed by RTQ-PCR using 1×TaqMan® Universal Master mix (Applied Biosystems; catalog No. 4324020), following the manufacturer's instructions. PCR amplification and analysis were done as described above.

### Panels 1, 1.1, 1.2, and 1.3D

[0359] Panels 1, 1.1, 1.2 and 1.3D included 2 control wells (genomic DNA control and chemistry control) and 94 wells of cDNA samples from cultured cell lines and primary normal tissues. Cell lines were derived from carcinomas (ca) including: lung, small cell (s cell var), non small cell (non-s or non-sm); breast; melanoma; colon; prostate; glioma (glio), astrocytoma (astro) and neuroblastoma (neuro); squamous cell (squam); ovarian; liver; renal; gastric and pancreatic from the American Type Culture Collection (ATCC, Bethesda, Md.). Normal tissues were obtained from individual adults or fetuses and included: adult and fetal skeletal muscle, adult and fetal heart, adult and fetal kidney, adult and fetal liver, adult and fetal lung, brain, spleen, bone marrow, lymph node, pancreas, salivary gland, pituitary gland, adrenal gland, spinal cord, thymus, stomach, small intestine, colon, bladder, trachea, breast, ovary, uterus, placenta, prostate, testis and adipose. The following abbreviations are used in reporting the results: metastasis (met); pleural effusion (pl. eff or p1 effusion) and * indicates established from metastasis.

### General_screening_panel_v1.4, v1.5, v1.6 and v1.7

[0360] Panels 1.4, 1.5, 1.6 and 1.7 were as described for Panels 1, 1.1, 1.2 and 1.3D, above except that normal tissue samples were pooled from 2 to 5 different adults or fetuses.

### Panels 2D, 2.2, 2.3 and 2.4

[0361] Panels 2D, 2.2, 2.3 and 2.4 included 2 control wells and 94 wells containing RNA or cDNA from human surgical specimens procured through the National Cancer Institute's Cooperative Human Tissue Network (CHTN) or the National Disease Research Initiative (NDRI), Ardais (Lexington, Mass.) or Clinomics BioSciences (Frederick, Md.). Tissues included human malignancies and in some cases matched adjacent normal tissue (NAT). Information regarding histopathological assessment of tumor differentiation grade as well as the clinical stage of the patient from which samples were obtained was generally available. Normal tissue RNA and cDNA samples were purchased from various commercial sources such as Clontech (Palo Alto, Calif.), Research Genetics and Invitrogen (Carlsbad, Calif.).

### HASS Panel v 1.0

[0362] The HASS Panel v1.0 included 93 cDNA samples and two controls including: 81 samples of cultured human cancer cell lines subjected to serum starvation, acidosis and anoxia according to established procedures for various lengths of time; 3 human primary cells; 9 malignant brain cancers (4 medulloblastomas and 5 glioblastomas); and 2 controls. Cancer cell lines (ATCC) were cultured using recommended conditions and included: breast, prostate, bladder, pancreatic and CNS. Primary human cells were obtained from Clonetics (Walkersville, Md.). Malignant brain samples were gifts from the Henry Ford Cancer Center.

### ARDAIS Panel v1.0 and v1.1

[0363] The ARDAIS Panel v1.0 and v1.1 included 2 controls and 22 test samples including: human lung adenocarcinomas, lung squamous cell carcinomas, and in some cases matched adjacent normal tissues (NAT) obtained from Ardais (Lexington, Mass.). Unmatched malignant and non-malignant RNA samples from lungs with gross histopathological assessment of tumor differentiation grade and stage and clinical state of the patient were obtained from Ardais.

### ARDAIS Prostate v1.0

[0364] ARDAIS Prostate v1.0 panel included 2 controls and 68 test samples of human prostate malignancies and in some cases matched adjacent normal tissues (NAT) obtained from Ardais (Lexington, Mass.). RNA from unmatched malignant and non-malignant prostate samples with gross histopathological assessment of tumor differentiation grade and stage and clinical state of the patient were also obtained from Ardais.

### ARDAIS Kidney v1.0

[0365] ARDAIS Kidney v1.0 panel included 2 control wells and 44 test samples of human renal cell carcinoma and in some cases matched adjacent normal tissue (NAT) obtained from Ardais (Lexington, Mass.). RNA from unmatched renal cell carcinoma and normal tissue with gross histopathological assessment of tumor differentiation grade and stage and clinical state of the patient were also obtained from Ardais.

### ARDAIS Breast v1.0

[0366] ARDAIS Breast v1.0 panel included 2 control wells and 71 test samples of human breast malignancies and in some cases matched adjacent normal tissue (NAT) obtained from Ardais (Lexington, Mass.). RNA from unmatched malignant and non-malignant breast samples with gross histopathological assessment of tumor differentiation grade and stage and clinical state of the patient were also obtained from Ardais.

### Panel 3D, 3.1 and 3.2

[0367] Panels 3D, 3.1, and 3.2 included two controls, 92 cDNA samples of cultured human cancer cell lines and 2 samples of human primary cerebellum. Cell lines (ATCC, National Cancer Institute (NCI), German tumor cell bank) were cultured as recommended and were derived from: squamous cell carcinoma of the tongue, melanoma, sarcoma, leukemia, lymphoma, and epidermoid, bladder, pancreas, kidney, breast, prostate, ovary, uterus, cervix, stomach, colon, lung and CNS carcinomas.

### Panels 4D, 4R, and 4.1D

[0368] Panels 4D, 4R, and 4. 1D included 2 control wells and 94 test samples of RNA (Panel 4R) or cDNA (Panels 4D and 4. 1D) from human cell lines or tissues related to inflammatory conditions. Controls included total RNA from normal tissues such as colon, lung (Stratagene, La Jolla, Calif.), thymus and kidney (Clontech, Palo Alto, Calif.). Total RNA from cirrhotic and lupus kidney was obtained from BioChain Institute, Inc., (Hayward, Calif.). Crohn's intestinal and ulcerative colitis samples were obtained from the National Disease Research Interchange (NDRI, Philadelphia, Pa.). Cells purchased from Clonetics (Walkersville, Md.) included: astrocytes, lung fibroblasts, dermal fibroblasts, coronary artery smooth muscle cells, small airway epithelium, bronchial epithelium, microvascular dermal endothelial cells, microvascular lung endothelial cells, human pulmonary aortic endothelial cells, and human umbilical vein endothelial. These primary cell types were activated by incubating with various cytokines (IL-1 beta ˜1-5 ng/ml, TNF alpha ˜5-10 ng/ml, iFN gamma ˜20-50 ng/ml, IL-4˜5-10 ng/ml, IL-9˜5-10 ng/ml, IL-13 5-10 ng/ml or combinations of cytokines as indicated. Starved endothelial cells were cultured in the basal media (Clonetics, Walkersville, Md.) with 0.1% serum.

[0369] Mononuclear cells were prepared from blood donations using Ficoll. LAK cells were cultured in culture media [DMEM, 5% FCS (Hyclone, Logan, Utah), 100 mM non essential amino acids (Gibco/Life Technologies, Rockville, Md.), 1 mM sodium pyruvate (Gibco), mercaptoethanol 5.5×10⁻⁵ M (Gibco), and 10 mM Hepes (Gibco)] and interleukin 2 for 4-6 days. Cells were activated with 10-20 ng/ml PMA and 1-2 μg/ml ionomycin, 5-10 ng/ml IL-12, 20-50 ng/ml IFN gamma or 5-10 ng/ml IL-18 for 6 hours. In some cases, mononuclear cells were cultured for 4-5 days in culture media with ˜5 mg/ml PHA (phytohemagglutinin) or PWM (pokeweed mitogen; Sigma-Aldrich Corp., St. Louis, Mo.). Samples were taken at 24, 48 and 72 hours for RNA preparation. MLR (mixed lymphocyte reaction) samples were obtained by taking blood from two donors, isolating the mononuclear cells using Ficoll and mixing them 1:1 at a final concentration of ˜2×10⁶ cells/ml in culture media. The MLR samples were taken at various time points from 1-7 days for RNA preparation.

[0370] Monocytes were isolated from mononuclear cells using CD14 Miltenyi Beads, +ve VS selection columns and a Vario Magnet (Miltenyi Biotec, Auburn, Calif.) according to the manufacturer's instructions. Monocytes were differentiated into dendritic cells by culturing in culture media with 50 ng/ml GMCSF and 5 ng/ml IL-4 for 5-7 days. Macrophages were prepared by culturing monocytes for 5-7 days in culture media with ˜50 ng/ml 10% type AB Human Serum (Life technologies, Rockville, Md.) or MCSF (Macrophage colony stimulating factor; R&D, Minneapolis, Minn.). Monocytes, macrophages and dendritic cells were stimulated for 6 or 12-14 hours with 100 ng/ml lipopolysaccharide (LPS). Dendritic cells were also stimulated with 10 μg/ml anti-CD40 monoclonal antibody (Pharmingen, San Diego, Calif.) for 6 or 12-14 hours.

[0371] CD4+ lymphocytes, CD8+ lymphocytes and NK cells were also isolated from mononuclear cells using CD4, CD8 and CD56 Miltenyi beads, positive VS selection columns and a Vario Magnet (Miltenyi Biotec, Auburn, Calif.) according to the manufacturer's instructions. CD45+RA and CD45+RO CD4+ lymphocytes were isolated by depleting mononuclear cells of CD8+, CD56+, CD14+ and CD19+ cells using CD8, CD56, CD14 and CD19 Miltenyi beads and positive selection. CD45RO Miltenyi beads were then used to separate the CD45+RO CD4+ lymphocytes from CD45+RA CD4+ lymphocytes. CD45+RA CD4+, CD45+RO CD4 + and CD8+ lymphocytes were cultured in culture media at 10⁶ cells/ml in culture plates precoated overnight with 0.5 mg/ml anti-CD28 (Pharmingen, San Diego, Calif.) and 3 Ig/ml anti-CD3 (OKT3, ATCC) in PBS. After 6 and 24 hours, the cells were harvested for RNA preparation. To prepare chronically activated CD8+ lymphocytes, isolated CD8+ lymphocytes were activated for 4 days on anti-CD28, anti-CD3 coated plates and then harvested and expanded in culture media with IL-2 (1 ng/ml). These CD8+ cells were activated again with plate bound anti-CD3 and anti-CD28 for 4 days and expanded as described above. RNA was isolated 6 and 24 hours after the second activation and after 4 days of the second expansion culture. Isolated NK cells were cultured in culture media with 1 ng/ml IL-2 for 4-6 days before RNA was prepared.

[0372] B cells were prepared from minced and sieved tonsil tissue (NDRI). Tonsil cells were pelleted and resupended at 10⁶ cells/ml in culture media. Cells were activated using 5 μg/ml PWM (Sigma-Aldrich Corp., St. Louis, Mo.) or ˜10 μg/ml anti-CD40 (Pharmingen, San Diego, Calif.) and 5-10 ng/ml IL-4. Cells were harvested for RNA preparation after 24, 48 and 72 hours.

[0373] To prepare primary and secondary Th1/Th2 and Tr1 cells, umbilical cord blood CD4+ lymphocytes (Poietic Systems, German Town, Md.) were cultured at 10⁵-10⁶cells/ml in culture media with IL-2 (4 ng/ml) in 6-well Falcon plates (precoated overnight with 10 μg/ml anti-CD28 (Pharmingen) and 2 μg/ml anti-CD3 (OKT3; ATCC) then washed twice with PBS).

[0374] To stimulate Th1 phenotype differentiation, IL-12 (5 ng/ml) and anti-IL4 (1 μg/ml) were used; for Th2 phenotype differentiation, IL-4 (5 ng/ml) and anti-IFN gamma (1 μg/ml) were used; and for Tr1 phenotype differentiation, IL-10 (5 ng/ml) was used. After 4-5 days, the activated Th1, Th2 and Tr1 lymphocytes were washed once with DMEM and expanded for 4-7 days in culture media with IL-2 (1 ng/ml). Activated Th1, Th2 and Tr1 lymphocytes were re-stimulated for 5 days with anti-CD28/CD3 and cytokines as described above with the addition of anti-CD95L (1 μg/ml) to prevent apoptosis. After 4-5 days, the Th1, Th2 and Tr1 lymphocytes were washed and expanded in culture media with IL-2 for 4-7 days. Activated Th1 and Th2 lymphocytes were maintained for a maximum of three cycles. RNA was prepared from primary and secondary Th1, Th2 and Tr1 after 6 and 24 hours following the second and third activations with plate-bound anti-CD3 and anti-CD28 mAbs and 4 days into the second and third expansion cultures.

[0375] Leukocyte cells lines Ramos, EOL-1, KU-812 were obtained from the ATCC. EOL-1 cells were further differentiated by culturing in culture media at 5×10⁵ cells/ml with 0.1 mM dbcAMP for 8 days, changing the media every 3 days and adjusting the cell concentration to 5×10⁵ cells/ml. RNA was prepared from resting cells or cells activated with PMA (10 ng/ml) and ionomycin (1 μg/ml) for 6 and 14 hours. RNA was prepared from resting CCD 1106 keratinocyte cell line (ATCC) or from cells activated with ˜5 ng/ml TNF alpha and 1 ng/ml IL-1 beta. RNA was prepared from resting NCI-H292, airway epithelial tumor cell line (ATCC) or from cells activated for 6 and 14 hours in culture media with 5 ng/ml IL-4, 5 ng/ml IL-9, 5 ng/ml IL-13, and 25 ng/ml IFN gamma.

[0376] RNA was prepared by lysing approximately 10⁷ cells/ml using Trizol (Gibco BRL) then adding 1/10 volume of bromochloropropane (Molecular Research Corporation, Cincinnati, Ohio), vortexing, incubating for 10 minutes at room temperature and then spinning at 14,000 rpm in a Sorvall SS34 rotor. The aqueous phase was placed in a 15 ml Falcon Tube and an equal volume of isopropanol was added and left at −20° C. overnight. The precipitated RNA was spun down at 9,000 rpm for 15 min and washed in 70% ethanol. The pellet was redissolved in 300 μl of RNAse-free water with 35 ml buffer (Promega, Madison, Wis.) 5 μl DTT, 7 μt RNAsin and 8 μl DNAse and incubated at 37° C. for 30 minutes to remove contaminating genomic DNA, extracted once with phenol chloroform and re-precipitated with 1/10 volume of 3 M sodium acetate and 2 volumes of 100% ethanol. The RNA was spun down, placed in RNAse free water and stored at −80° C.

### AI_comprehensive panel_v1.0

[0377] Autoimmunity (AI) comprehensive panel v1.0 included two controls and 89 cDNA test samples isolated from male (M) and female (F) surgical and postmortem human tissues that were obtained from the Backus Hospital and Clinomics (Frederick, Md.). Tissue samples included : normal, adjacent (Adj); matched normal adjacent (match control); joint tissues (synovial (Syn) fluid, synovium, bone and cartilage, osteoarthritis (OA), rheumatoid arthritis (RA)); psoriatic; ulcerative colitis colon; Crohns disease colon; and emphysmatic, asthmatic, allergic and chronic obstructive pulmonary disease (COPD) lung.

### Pulmonary and General Inflammation (PGI) Panel v1.0

[0378] Pulmonary and General inflammation (PGI) panel v1.0 included two controls and 39 test samples isolated as surgical or postmortem samples. Tissue samples include: five normal lung samples obtained from Maryland Brain and Tissue Bank, University of Maryland (Baltimore, Md.), International Bioresource systems, IBS (Tuscon, Ariz.), and Asterand (Detroit, Mich.), five normal adjacent intestine tissues (NAT) from Ardais (Lexington, Mass.), ulcerative colitis samples (UC) from Ardais (Lexington, Mass.); Crohns disease colon from NDRI, National Disease Research Interchange (Philadelphia, Pa.); emphysematous tissue samples from Ardais (Lexington, Mass.) and Genomic Collaborative Inc. (Cambridge, Mass.), asthmatic tissue from Maryland Brain and Tissue Bank, University of Maryland (Baltimore, Md.) and Genomic Collaborative Inc (Cambridge, Mass.) and fibrotic tissue from Ardais (Lexinton, Mass.) and Genomic Collaborative (Cambridge, Mass.).

### Cellular OA/RA Panel

[0379] Cellular OA.RA panel includes 2 control wells and 35 test samples comprised of cDNA generated from total RNA isolated from human cell lines or primary cells representative of the human joint and its inflammatory condition. Cell types included normal human osteoblasts (Nhost) from Clonetics (Cambrex, East Rutherford, N.J.), human chondrosarcoma SW1353 cells from ATCC (Manossas, Va.)), human fibroblast-like synoviocytes from Cell Applications, Inc. (San Diego, Calif.) and MH7A cell line (a rheumatoid fibroblast-like synoviocytes transformed with SV40 T antigen) from Riken Cell bank (Tsukuba Science City, Japan). These cell types were activated by incubating with various cytokines (IL-1 beta ˜1-10 ng/ml, TNF alpha ˜5-50 ng/ml, or prostaglandin E2 for Nhost cells) for 1, 6, 18 or 24 h. All these cells were starved for at least 5 h and cultured in their corresponding basal medium with ˜0.1 to 1% FBS.

### Minitissue OA/RA Panel

[0380] The OA/RA mini panel includes two control wells and 31 test samples comprised of cDNA generated from total RNA isolated from surgical and postmortem human tissues obtained from the University of Calgary (Alberta, Canada), NDRI (Philadelphia, Pa.), and Ardais Corporation (Lexington, Mass.). Joint tissue samples include synovium, bone and cartilage from osteoarthritic and rheumatoid arthritis patients undergoing reconstructive knee surgery, as well as, normal synovium samples (RNA and tissue). Visceral normal tissues were pooled from 2-5 different adults and included adrenal gland, heart, kidney, brain, colon, lung, stomach, small intestine, skeletal muscle, and ovary.

### AI.05 Chondrosarcoma

[0381] AI.05 chondrosarcoma plates included SW1353 cells (ATCC) subjected to serum starvation and treated for 6 and 18 h with cytokines that are known to induce MMP (1, 3 and 13) synthesis (e.g. IL1beta). These treatments included: IL-1beta (10 ng/ml), IL-1beta+TNF-alpha (50 ng/ml), IL-1beta+Oncostatin (50 ng/ml) and PMA (100 ng/ml). Supernatants were collected and analyzed for MMP 1, 3 and 13 production. RNA was prepared from these samples using standard procedures.

### Panels 5D and 51

[0382] Panel 5D and 5I included two controls and cDNAs isolated from human tissues, human pancreatic islets cells, cell lines, metabolic tissues obtained from patients enrolled in the Gestational Diabetes study (described below), and cells from different stages of adipocyte differentiation, including differentiated (AD), midway differentiated (AM), and undifferentiated (U; human mesenchymal stem cells).

[0383] Gestational Diabetes study subjects were young (18-40 years), otherwise healthy women with and without gestational diabetes undergoing routine (elective) Caesarean section. Uterine wall smooth muscle (UT), visceral (Vis) adipose, skeletal muscle (SK), placenta (PI) greater omentum adipose (GO Adipose) and subcutaneous (SubQ) adipose samples (less than 1 cc) were collected, rinsed in sterile saline, blotted and flash frozen in liquid nitrogen. Patients included: Patient 2, an overweight diabetic Hispanic not on insulin; Patient 7-9, obese non-diabetic Caucasians with body mass index (BMI) greater than 30; Patient 10, an overweight diabetic Hispanic, on insulin; Patient 11, an overweight nondiabetic African American; and Patient 12, a diabetic Hispanic on insulin.

[0384] Differentiated adipocytes were obtained from induced donor progenitor cells (Clonetics, Walkersville, Md.). Differentiated human mesenchymal stem cells (HuMSCs) were prepared as described in Mark F. Pittenger, et al., Multilineage Potential of Adult Human Mesenchymal Stem Cells Science Apr. 2 1999: 143-147. mRNA was isolated and sscDNA was produced from Trizol lysates or frozen pellets. Human cell lines (ATCC, NCI or German tumor cell bank) included: kidney proximal convoluted tubule, uterine smooth muscle cells, small intestine, liver HepG2 cancer cells, heart primary stromal cells and adrenal cortical adenoma cells. Cells were cultured, RNA extracted and sscDNA was produced using standard procedures.

[0385] Panel 5I also contains pancreatic islets (Diabetes Research Institute at the University of Miami School of Medicine).

### Human Metabolic RTQ-PCR Panel

[0386] Human Metabolic RTQ-PCR Panel included two controls (genomic DNA control and chemistry control) and 211 cDNAs isolated from human tissues and cell lines relevant to metabolic diseases. This panel identifies genes that play a role in the etiology and pathogenesis of obesity and/or diabetes. Metabolic tissues including placenta (PI), uterine wall smooth muscle (Ut), visceral adipose, skeletal muscle (Sk) and subcutaneous (SubQ) adipose were obtained from the Gestational Diabetes study (described above). Included in the panel are: Patients 7 and 8, obese non-diabetic Caucasians; Patient 12 a diabetic Caucasian with unknown BMI, on insulin (treated); Patient 13, an overweight diabetic Caucasian, not on insulin (untreated); Patient 15, an obese, untreated, diabetic Caucasian; Patient 17 and 25, untreated diabetic Caucasians of normal weight; Patient 18, an obese, untreated, diabetic Hispanic; Patient 19, a non-diabetic Caucasian of normal weight; Patient 20, an overweight, treated diabetic Caucasian; Patient 21 and 23, overweight non- diabetic Caucasians; Patient 22, a treated diabetic Caucasian of normal weight; Patient 23, an overweight non-diabetic Caucasian; and Patients 26 and 27, obese, treated, diabetic Caucasians.

[0387] Total RNA was isolated from metabolic tissues including: hypothalamus, liver, pancreas, pancreatic islets, small intestine, psoas muscle, diaphragm muscle, visceral (Vis) adipose, subcutaneous (SubQ) adipose and greater omentum (Go) from 12 Type II diabetic (Diab) patients and 12 non diabetic (Norm) at autopsy. Control diabetic and non-diabetic subjects were matched where possible for: age; sex, male (M); female (F); ethnicity, Caucasian (CC); Hispanic (HI); African American (AA); Asian (AS); and BMI, 20-25 (Low BM), 26-30 (Med BM) or overweight (Overwt), BMI greater than 30 (Hi BMI) (obese).

[0388] RNA was extracted and ss cDNA was produced from cell lines (ATCC) by standard methods.

### CNS Panels

[0389] CNS Panels CNSD.01, CNS Neurodegeneration V1.0 and CNS Neurodegeneration V2.0 included two controls and 46 to 94 test cDNA samples isolated from postmortem human brain tissue obtained from the Harvard Brain Tissue Resource Center (McLean Hospital). Brains were removed from calvaria of donors between 4 and 24 hours after death, and frozen at −80° C. in liquid nitrogen vapor.

### Panel CNSD.01

[0390] Panel CNSD.01 included two specimens each from: Alzheimer's disease, Parkinson's disease, Huntington's disease, Progressive Supernuclear Palsy (PSP), Depression, and normal controls. Collected tissues included: cingulate gyrus (Cing Gyr), temporal pole (Temp Pole), globus palladus (Glob palladus), substantia nigra (Sub Nigra), primary motor strip (Brodman Area 4), parietal cortex (Brodman Area 7), prefrontal cortex (Brodman Area 9), and occipital cortex (Brodman area 17). Not all brain regions are represented in all cases.

### Panel CNS Neurodegeneration V1.0

[0391] The CNS Neurodegeneration V1.0 panel included: six Alzheimer's disease (AD) brains and eight normals which included no dementia and no Alzheimer's like pathology (control) or no dementia but evidence of severe Alzheimer's like pathology (Control Path), specifically senile plaque load rated as level 3 on a scale of 0-3; 0 no evidence of plaques, 3 severe AD senile plaque load. Tissues collected included: hippocampus, temporal cortex (Brodman Area 21), parietal cortex (Brodman area 7), occipital cortex (Brodman area 17) superior temporal cortex (Sup Temporal Ctx) and inferior temporal cortex (Inf Temproal Ctx).

[0392] Gene expression was analyzed after normalization using a scaling factor calculated by subtracting the Well mean (CT average for the specific tissue) from the Grand mean (average CT value for all wells across all runs). The scaled CT value is the result of the raw CT value plus the scaling factor.

### Panel CNS Neurodegeneration V2.0

[0393] The CNS Neurodegeneration V2.0 panel included sixteen cases of Alzheimer's disease (AD) and twenty-nine normal controls (no evidence of dementia prior to death) including fourteen controls (Control) with no dementia and no Alzheimer's like pathology and fifteen controls with no dementia but evidence of severe Alzheimer's like pathology (AH3), specifically senile plaque load rated as level 3 on a scale of 0-3; 0 no evidence of plaques, 3 severe AD senile plaque load. Tissues from the temporal cortex (Brodman Area 21) included the inferior and superior temporal cortex that was pooled from a given individual (Inf & Sup Temp Ctx Pool).

[0394] A. NOV1 (CG104903-03 and CG104903-09 and CG104903-10): HMW Kininogen with 5′utr.

[0395] Expression of genes the CG104903-03, CG104903-09 and CG104903-10 was assessed using the primer-probe sets Ag3374 and Ag4269, described in Tables AA and AB. Results of the RTQ-PCR runs are shown in Tables AC and AD.

TABLE AA

Probe Name Ag3374

| | | | Start | SEQ ID |
|---|---|---|---|---|
| Primers | Sequences | Length | Position | No |
| Forward | 5′-gattgcaacgctgaagtttatg-3′ | 22 | 1097 | 205 |
| Probe | TET-5′-ctgtcaactgtcaaccactgggaatg-3′- | 26 | 1149 | 206 |
| | TAMRA | | | |
| Reverse | 5′-gaggccttttcatcagtgagat-3′ | 22 | 1175 | 207 |

[0396] TABLE AB

Probe Name Ag4269

| | | | Start | SEQ ID |
|---|---|---|---|---|
| Primers: | Sequences | Length | Position | No |
| Forward | 5′-acagagcatttggcaagct-3′ | 19 | 1610 | 208 |
| Probe | TET-5′-cagtactacaccttctgcacagacaca-3′- | 27 | 1639 | 209 |
| | TAMRA | | | |
| Reverse | 5′-gttggcccttctgtcttctc-3′ | 20 | 1667 | 210 |

[0397] TABLE AC
Ardais Kidney 1.0

| Tissue Name | A |
|---|---|
| Kidney cancer(10A8) | 0.0 |
| Kidney NAT(10A9) | 42.9 |
| Kidney cancer(10AA) | 0.0 |
| Kidney NAT(10AB) | 27.7 |
| Kidney cancer(10AC) | 0.0 |
| Kidney NAT(10AD) | 28.1 |
| Kidney cancer(10B6) | 0.2 |
| Kidney NAT(10B7) | 20.3 |
| Kidney cancer(10B8) | 2.0 |
| Kidney NAT(10B9) | 41.5 |
| Kidney cancer(10BC) | 0.2 |
| Kidney NAT(10BD) | 31.6 |
| Kidney cancer(10BE) | 0.4 |
| Kidney NAT(10BF) | 100.0 |
| Kidney cancer(10C2) | 0.1 |
| Kidney NAT(10C3) | 22.1 |
| Kidney cancer(10C4) | 0.1 |
| Kidney NAT(10C5) | 36.1 |
| Kidney cancer(10B4) | 0.0 |
| Kidney cancer(10C8) | 0.0 |
| Kidney cancer(10D0) | 0.0 |
| Kidney cancer(10C0) | 0.0 |
| Kidney cancer(10C6) | 0.0 |
| Kidney cancer(10C9) | 0.0 |
| Kidney cancer(10D1) | 0.0 |
| Kidney cancer(10CA) | 0.0 |
| Kidney cancer(10D2) | 0.0 |
| Kidney cancer(10CB) | 0.0 |
| Kidney cancer(10D4) | 0.1 |
| Kidney cancer(10CD) | 0.0 |
| Kidney cancer(10D5) | 1.0 |
| Kidney cancer(10CE) | 0.1 |
| Kidney cancer(10D6) | 0.0 |
| Kidney cancer(10CF) | 0.1 |
| Kidney cancer(10D8) | 0.0 |
| Kidney cancer(10CC) | 0.1 |
| Kidney cancer(10D3) | 0.0 |
| Kidney NAT(10D9) | 23.2 |
| Kidney NAT(10DB) | 10.5 |
| Kidney NAT(10DC) | 55.9 |
| Kidney NAT(10DD) | 50.0 |
| Kidney NAT(10DE) | 57.0 |
| Kidney NAT(10B1) | 8.8 |
| Kidney NAT(10DA) | 23.8 |

Column A - Rel. Exp. (%) Ag3374, Run 343519951

[0398] TABLE AD
Panel 4.1D

| Tissue Name | A |
|---|---|
| Secondary Th1 act | 0.4 |
| Secondary Th2 act | 0.4 |
| Secondary Tr1 act | 0.0 |
| Secondary Th1 rest | 0.0 |
| Secondary Th2 rest | 0.1 |
| Secondary Tr1 rest | 0.2 |
| Primary Th1 act | 0.3 |
| Primary Th2 act | 0.3 |
| Primary Tr1 act | 0.1 |
| Primary Th1 rest | 0.1 |
| Primary Th2 rest | 0.1 |
| Primary Tr1 rest | 0.2 |
| CD45RA CD4 lymphocyte act | 0.0 |
| CD45RO CD4 lymphocyte act | 0.5 |
| CD8 lymphocyte act | 0.4 |
| Secondary CD8 lymphocyte rest | 0.5 |
| Secondary CD8 lymphocyte act | 1.1 |
| CD4 lymphocyte none | 0.1 |
| 2ry Th1/Th2/Tr1 anti-CD95 CH11 | 0.0 |
| LAK cells rest | 0.1 |
| LAK cells IL-2 | 0.4 |
| LAK cells IL-2 + IL-12 | 0.2 |
| LAK cells IL-2 + IFN gamma | 0.3 |
| LAK cells IL-2 + IL-18 | 0.4 |
| LAK cells PMA/ionomycin | 0.5 |
| NK Cells IL-2 rest | 0.4 |
| Two Way MLR 3 day | 0.0 |
| Two Way MLR 5 day | 0.1 |
| Two Way MLR 7 day | 0.1 |
| PBMC rest | 0.0 |
| PBMC PWM | 0.5 |
| PBMC PHA-L | 0.4 |
| Ramos (B cell) none | 0.3 |
| Ramos (B cell) ionomycin | 0.0 |
| B lymphocytes PWM | 0.5 |
| B lymphocytes CD40L and IL-4 | 0.0 |
| EOL-1 dbcAMP | 0.1 |
| EOL-1 dbcAMP PMA/ionomycin | 0.0 |
| Dendritic cells none | 0.0 |
| Dendritic cells LPS | 0.0 |
| Dendritic cells anti-CD40 | 0.0 |
| Monocytes rest | 0.0 |
| Monocytes LPS | 0.0 |
| Macrophages rest | 0.0 |
| Macrophages LPS | 0.0 |
| HUVEC none | 0.0 |
| HUVEC starved | 0.0 |
| HUVEC IL-1beta | 0.0 |
| HUVEC IFN gamma | 0.1 |
| HUVEC TNF alpha + IFN gamma | 0.0 |
| HUVEC TNF alpha + IL4 | 0.0 |
| HUVEC IL-11 | 0.2 |
| Lung Microvascular EC none | 0.2 |
| Lung Microvascular EC TNFalpha + IL-1beta | 0.0 |
| Microvascular Dermal EC none | 0.1 |
| Microsvasular Dermal EC TNFalpha + IL-1beta | 0.0 |
| Bronchial epithelium TNFalpha + IL1beta | 0.0 |
| Small airway epithelium none | 0.0 |
| Small airway epithelium TNFalpha + IL-1beta | 0.0 |
| Coronery artery SMC rest | 0.1 |
| Coronery artery SMC TNFalpha + IL-1beta | 0.0 |
| Astrocytes rest | 0.0 |
| Astrocytes TNFalpha + IL-1beta | 0.0 |
| KU-812 (Basophil) rest | 0.0 |
| KU-812 (Basophil) PMA/ionomycin | 0.0 |
| CCD1106 (Keratinocytes) none | 0.0 |
| CCD1106 (Keratinocytes) TNFalpha + IL-1beta | 0.0 |
| Liver cirrhosis | 26.4 |
| NCI-H292 none | 0.0 |
| NCI-H292 IL-4 | 0.0 |
| NCI-H292 IL-9 | 0.1 |
| NCI-H292 IL-13 | 0.0 |
| NCI-H292 IFN gamma | 0.0 |
| HPAEC none | 0.0 |
| HPAEC TNF alpha + IL-1 beta | 0.0 |
| Lung fibroblast none | 0.1 |
| Lung fibroblast TNF alpha + IL-1 beta | 0.3 |
| Lung fibroblast IL-4 | 0.0 |
| Lung fibroblast IL-9 | 0.1 |
| Lung fibroblast IL-13 | 0.1 |
| Lung fibroblast IFN gamma | 0.1 |
| Dermal fibroblast CCD1070 rest | 0.0 |
| Dermal fibroblast CCD1070 TNF alpha | 0.3 |
| Dermal fibroblast CCD1070 IL-1 beta | 0.0 |
| Dermal fibroblast IFN gamma | 0.6 |
| Dermal fibroblast IL-4 | 0.1 |
| Dermal Fibroblasts rest | 0.9 |
| Neutrophils TNFa + LPS | 0.5 |
| Neutrophils rest | 0.3 |
| Colon | 0.8 |
| Lung | 1.8 |
| Thymus | 8.8 |
| Kidney | 100.0 |

Column A - Rel. Exp. (%) Ag4269, Run 182243380

[0399] Ardais Kidney 1.0 Summary: Ag3374 Much higher expression of this gene was detected in normal kidney tissues (CT=19.71-23.21) adjacent to a tumor, while most renal tumor tissues had low to non-detectable levels of its expression. Thus, expression of this gene can be used as a marker of normal kidney. In addition, therapeutic modulation of this gene, expressed protein and/or use of antibodies or small molecule drugs targeting the gene or gene product are useful in the treatment of renal cancer.

[0400] Panel 4.1D Summary: Ag5115/Ag4269 Two experiments with two different probe and primer sets were in good agreement with highest expression of the CG104903-06 in the kidney (CTs=27). Moderate levels of expression of this gene was also seen in thymus, lung and colon. The probe and primer sets for Ag5115 are specific to CG104903-06. In a second experiment with Ag4269 low levels of expression of this gene was also seen in selected samples, including T cells, neutrophils, and activated dermal fibroblasts, indicating that the protien encoded by this gene play an important role in T cell development. In addition, moderate expression was seen in liver cirrhosis (CT=28.73). Thus, therapeutic modulation of this gene, expressed protein and/or use of antibodies or small molecule drugs targeting the gene or gene product are useful in modulation of liver function, identification and treatment of inflammatory or autoimnmune diseases which effect the liver including liver cirrhosis and fibrosis.

[0401] B. NOV2a (CG120844-02): IL-1 Beta-like

[0402] Expression of gene CG120844-02 was assessed using the primer-probe sets Ag1141, Ag6369, Ag6601, Ag6658 and Ag6701, described in Tables BA, BB, BC, BD and BE. Results of the RTQ-PCR runs are shown in Tables BF, BG and BH.

TABLE BA

Probe Name Ag1141

| | | | Start | SEQ ID |
|---|---|---|---|---|
| Primers | Sequences | Length | Position | No |
| Forward | 5′-tctcaagcagaaaacatgcc-3′ | 20 | 572 | 211 |
| Probe | TET-5′-aggcggccaggatataactgacttca-3′- | 26 | 613 | 212 |
| | TAMRA | | | |
| Reverse | 5′-ggaagacacaaattgcatgg-3′ | 20 | 639 | 213 |

[0403] TABLE BB

Probe Name Ag6369

| | | | Start | SEQ ID |
|---|---|---|---|---|
| Primers | Sequences | Length | Position | No |
| Forward | 5′-aactgaaagctctccacctcc-3′ | 21 | 321 | 214 |
| Probe | TET-5′-tgtggccttgggcctcaagg-3′-TAMRA | 20 | 370 | 215 |
| Reverse | 5′-cgcaggacaggtacagattctt-3′ | 22 | 392 | 216 |

[0404] TABLE BC

Probe Name Ag6601

| | | | Start | SEQ ID |
|---|---|---|---|---|
| Primers | Sequences | Length | Position | No |
| Forward | 5′-tccacctccaaggagaagaa-3′ | 20 | 333 | 217 |
| Probe | TET-5′-cccaaggccacaggtattttgtcatt-3′- | 26 | 356 | 218 |
| | TAMRA | | | |
| Reverse | 5′-acacgcaggacaggtacagat-3′ | 21 | 396 | 219 |

[0405] TABLE BD

Probe Name Ag6658

| | | | Start | SEQ ID |
|---|---|---|---|---|
| Primers | Sequences | Length | Position | No |
| Forward | 5′-tccacctccaaggagaagaa-3′ | 20 | 333 | 220 |
| Probe | TET-5′-cccaaggccacaggtattttgtcatt-3′- | 26 | 356 | 221 |
| | TAMRA | | | |
| Reverse | 5′-acacgcaggacaggtacagat-3′ | 21 | 396 | 222 |

[0406] TABLE BE

Probe Name Ag6701

| | | | Start | SEQ ID |
|---|---|---|---|---|
| Primers | Sequences | Length | Position | No |
| Forward | 5′-tccacctccaaggagaagaa-3′ | 20 | 333 | 223 |
| Probe | TET-5′-cccaaggccacaggtattttgtcatt-3′- | 26 | 356 | 224 |
| | TAMRA | | | |
| Reverse | 5′-acacgcaggacaggtacagat-3′ | 21 | 396 | 225 |

[0407] TABLE BF
AI_comprehensive panel_v1.0

| Tissue Name | A | B | C |
|---|---|---|---|
| 110967 COPD-F | 0.4 | 0.3 | 0.0 |
| 110980 COPD-F | 0.5 | 0.5 | 0.0 |
| 110968 COPD-M | 0.7 | 0.5 | 0.0 |
| 110977 COPD-M | 1.0 | 1.3 | 0.0 |
| 110989 Emphysema-F | 0.8 | 0.7 | 0.0 |
| 110992 Emphysema-F | 0.9 | 0.7 | 0.0 |
| 110993 Emphysema-F | 0.5 | 0.3 | 0.0 |
| 110994 Emphysema-F | 0.0 | 0.2 | 0.0 |
| 110995 Emphysema-F | 1.7 | 2.6 | 0.0 |
| 110996 Emphysema-F | 1.4 | 1.1 | 0.0 |
| 110997 Asthma-M | 2.9 | 1.0 | 0.0 |
| 111001 Asthma-F | 1.6 | 1.1 | 0.0 |
| 111002 Asthma-F | 0.4 | 1.3 | 0.0 |
| 111003 Atopic Asthma-F | 1.2 | 1.1 | 0.0 |
| 111004 Atopic Asthma-F | 1.4 | 1.0 | 0.0 |
| 111005 Atopic Asthma-F | 0.8 | 0.6 | 0.0 |
| 111006 Atopic Asthma-F | 0.1 | 0.1 | 0.0 |
| 111417 Allergy-M | 0.8 | 0.7 | 0.0 |
| 112347 Allergy-M | 0.1 | 0.0 | 0.0 |
| 112349 Normal Lung-F | 0.0 | 0.0 | 0.0 |
| 112357 Normal Lung-F | 1.5 | 1.5 | 0.0 |
| 112354 Normal Lung-M | 1.4 | 1.0 | 0.0 |
| 112374 Crohns-F | 0.4 | 0.4 | 18.9 |
| 112389 Match Control Crohns-F | 0.4 | 0.4 | 0.0 |
| 112375 Crohns-F | 0.7 | 0.4 | 0.0 |
| 112732 Match Control Crohns-F | 3.3 | 4.0 | 11.8 |
| 112725 Crohns-M | 0.8 | 0.2 | 0.0 |
| 112387 Match Control Crohns-M | 0.9 | 0.5 | 0.0 |
| 112378 Crohns-M | 0.2 | 0.0 | 0.0 |
| 112390 Match Control Crohns-M | 0.8 | 0.8 | 0.0 |
| 112726 Crohns-M | 1.3 | 1.6 | 0.0 |
| 112731 Match Control Crohns-M | 1.8 | 1.0 | 0.0 |
| 112380 Ulcer Col-F | 0.5 | 0.5 | 0.0 |
| 112734 Match Control Ulcer Col-F | 100.0 | 100.0 | 100.0 |
| 112384 Ulcer Col-F | 4.9 | 3.5 | 0.0 |
| 112737 Match Control Ulcer Col-F | 1.4 | 1.3 | 0.0 |
| 112386 Ulcer Col-F | 0.7 | 0.3 | 0.0 |
| 112738 Match Control Ulcer Col-F | 5.7 | 7.4 | 0.0 |
| 112381 Ulcer Col-M | 1.1 | 0.0 | 0.0 |
| 112735 Match Control Ulcer Col-M | 2.0 | 0.5 | 0.0 |
| 112382 Ulcer Col-M | 1.5 | 0.9 | 0.0 |
| 112394 Match Control Ulcer Col-M | 0.4 | 0.1 | 0.0 |
| 112383 Ulcer Col-M | 7.3 | 10.0 | 18.4 |
| 112736 Match Control Ulcer Col-M | 0.4 | 0.3 | 0.0 |
| 112423 Psoriasis-F | 17.2 | 7.2 | 0.0 |
| 112427 Match Control Psoriasis-F | 1.1 | 1.1 | 0.0 |
| 112418 Psoriasis-M | 1.1 | 0.7 | 0.0 |
| 112723 Match Control Psoriasis-M | 0.0 | 0.0 | 0.0 |
| 112419 Psoriasis-M | 1.4 | 1.3 | 0.0 |
| 112424 Match Control Psoriasis-M | 0.5 | 0.5 | 0.0 |
| 112420 Psoriasis-M | 1.9 | 1.7 | 0.0 |
| 112425 Match Control Psoriasis-M | 1.3 | 0.7 | 0.0 |
| 104689 (MF) OA Bone-Backus | 3.1 | 3.6 | 11.6 |
| 104690 (MF) Adj “Normal” | 1.0 | 1.0 | 0.0 |
| Bone-Backus | | | |
| 104691 (MF) OA Synovium-Backus | 0.8 | 0.5 | 0.0 |
| 104692 (BA) OA Cartilage-Backus | 0.0 | 0.0 | 0.0 |
| 104694 (BA) OA Bone-Backus | 1.6 | 1.3 | 0.0 |
| 104695 (BA) Adj “Normal” | 1.1 | 0.8 | 0.0 |
| Bone-Backus | | | |
| 104696 (BA) OA Synovium-Backus | 1.0 | 1.0 | 0.0 |
| 104700 (SS) OA Bone-Backus | 0.8 | 2.5 | 16.2 |
| 104701 (SS) Adj “Normal” | 1.6 | 1.9 | 0.0 |
| Bone-Backus | | | |
| 104702 (SS) OA Synovium-Backus | 0.9 | 1.1 | 0.0 |
| 117093 OA Cartilage Rep7 | 3.0 | 3.4 | 12.7 |
| 112672 OA Bone5 | 1.8 | 1.1 | 0.0 |
| 112673 OA Synovium5 | 1.6 | 0.6 | 0.0 |
| 112674 OA Synovial Fluid cells5 | 0.8 | 0.8 | 0.0 |
| 117100 OA Cartilage Rep14 | 0.2 | 0.4 | 0.0 |
| 112756 OA Bone9 | 4.8 | 1.1 | 0.0 |
| 112757 OA Synovium9 | 0.1 | 0.1 | 0.0 |
| 112758 OA Synovial Fluid Cells9 | 0.5 | 0.3 | 0.0 |
| 117125 RA Cartilage Rep2 | 1.6 | 1.0 | 0.0 |
| 113492 Bone2 RA | 12.7 | 6.7 | 0.0 |
| 113493 Synovium2 RA | 6.0 | 2.5 | 0.0 |
| 113494 Syn Fluid Cells RA | 8.1 | 5.1 | 0.0 |
| 113499 Cartilage4 RA | 16.4 | 5.6 | 0.0 |
| 113500 Bone4 RA | 18.0 | 5.8 | 0.0 |
| 113501 Synovium4 RA | 10.5 | 3.7 | 0.0 |
| 113502 Syn Fluid Cells4 RA | 8.5 | 3.8 | 0.0 |
| 113495 Cartilage3 RA | 7.1 | 5.4 | 0.0 |
| 113496 Bone3 RA | 9.7 | 5.4 | 0.0 |
| 113497 Synovium3 RA | 6.0 | 3.7 | 0.0 |
| 113498 Syn Fluid Cells3 RA | 12.3 | 7.5 | 10.8 |
| 117106 Normal Cartilage Rep20 | 0.3 | 0.1 | 0.0 |
| 113663 Bone3 Normal | 0.1 | 0.0 | 0.0 |
| 113664 Synovium3 Normal | 0.0 | 0.0 | 0.0 |
| 113665 Syn Fluid Cells3 Normal | 0.0 | 0.0 | 0.0 |
| 117107 Normal Cartilage Rep22 | 0.2 | 0.1 | 0.0 |
| 113667 Bone4 Normal | 2.7 | 1.7 | 0.0 |
| 113668 Synovium4 Normal | 3.0 | 1.6 | 0.0 |
| 113669 Syn Fluid Cells4 Normal | 2.9 | 2.5 | 0.0 |

Column A - Rel. Exp. (%) Ag1141, Run 211061879
Column B - Rel. Exp. (%) Ag6369, Run 275481216
Column C - Rel. Exp. (%) Ag6658, Run 275481272

[0408] TABLE BG
Cellular OA/RA

| Tissue Name | A |
|---|---|
| 158667 Nhost medium 1 h | 0.0 |
| 158670 Nhost + IL-1b (10 ng/ml), 1 h | 1.1 |
| 158673 Nhost + PGE2 (10-6M) 1 h | 0.0 |
| 158668 Nhost medium alone 6h | 0.0 |
| 158671 Nhost + IL-1b (10 ng/ml) 6 h | 13.7 |
| 158674 Nhost + PGE2 (10-6M) 6 h | 0.3 |
| 158669 Nhost medium alone 24 h | 0.0 |
| 158672 Nhost + IL-1b (10 ng/ml) 24 h | 0.4 |
| 158675 Nhost + PGE2 (10-6M) 24 h | 0.0 |
| 164327 SW1353 medium alone 1 h | 0.0 |
| 164328 SW1353 + IL-1b (1 ng/ml) 1 h | 1.2 |
| 164329 SW1353 + IL-1b (10 ng/ml) 1 h | 0.8 |
| 164330 SW1353 +TNF-a (10 ng/ml) 1 h | 0.4 |
| 164331 SW1353 +TNF-a (100 ng/ml) 1 h | 0.5 |
| 164332 SW1353 medium alone 6 h | 0.1 |
| 164333 SW1353 + IL-1b (1 ng/ml) 6 h | 4.6 |
| 164334 SW1353 + IL-1b (10 ng/ml) 6 h | 5.4 |
| 164335 SW1353 + TNF-a (10 ng/ml) 6 h | 0.9 |
| 164336 SW1353 + TNF-a (100 ng/ml) 6 h | 1.7 |
| 164337 SW1353 medium alone 18 h | 0.1 |
| 164338 SW1353 + IL-1b (1 ng/ml) 18 h | 11.0 |
| 164339 SW1353 + IL-1b (10 ng/ml) 18 h | 10.2 |
| 164340 SW1353 + TNF-a (10 ng/ml) 18 h | 1.9 |
| 164341 SW1353 + IL-1b (100 ng/ml) 18 h | 3.1 |
| 173326 HFLS-RA (cell application) medium alone 18 h | 0.0 |
| 173327 HFLS-RA (cell application) + TNF-a 18 h | 1.5 |
| 173331 MH7A (synoviocyte cell line) medium 1 h | 0.9 |
| 173332 MH7A (synoviocyte cell line) + IL1b 1 h | 18.7 |
| 173334 MH7A (synoviocyte cell line) TNFa 1 h | 100.0 |
| 173336 MH7A (synoviocyte cell line) medium alone 6 h | 1.5 |
| 173339 MH7A (synoviocyte cell line) + IL1b 6 h | 36.6 |
| 173341 MH7A (synoviocyte cell line) TNFa 6 h | 11.6 |
| 173342 MH7A (synoviocyte cell line) medium alone 18 h | 4.1 |
| 173344 MH7A (synoviocyte cell line) + IL1b 18 h | 19.9 |
| 173346 MH7A (synoviocyte cell line) TNF-a 18 h | 54.3 |

Column A - Rel. Exp. (%) Ag1141, Run 411804421

[0409] TABLE BH
General_screening_panel_v1.4

| Tissue Name | A | B |
|---|---|---|
| Adipose | 0.7 | 0.9 |
| Melanoma* Hs688(A).T | 0.0 | 0.0 |
| Melanoma* Hs688(B).T | 0.1 | 0.1 |
| Melanoma* M14 | 0.0 | 0.1 |
| Melanoma* LOXIMVI | 80.7 | 94.0 |
| Melanoma* SK-MEL-5 | 0.0 | 0.0 |
| Squamous cell carcinoma SCC-4 | 4.2 | 4.5 |
| Testis Pool | 0.1 | 0.1 |
| Prostate ca.* (bone met) PC-3 | 1.2 | 1.1 |
| Prostate Pool | 0.1 | 0.0 |
| Placenta | 0.1 | 0.1 |
| Uterus Pool | 0.0 | 0.0 |
| Ovarian ca. OVCAR-3 | 0.1 | 0.0 |
| Ovarian ca. SK-OV-3 | 0.3 | 0.3 |
| Ovarian ca. OVCAR-4 | 0.0 | 0.0 |
| Ovarian ca. OVCAR-5 | 0.1 | 0.1 |
| Ovarian ca. IGROV-1 | 0.0 | 0.0 |
| Ovarian ca. OVCAR-8 | 0.1 | 0.0 |
| Ovary | 0.0 | 0.0 |
| Breast ca. MCF-7 | 0.0 | 0.0 |
| Breast ca. MDA-MB-231 | 0.1 | 0.3 |
| Breast ca. BT 549 | 0.1 | 0.2 |
| Breast ca. T47D | 0.1 | 0.1 |
| Breast ca. MDA-N | 0.0 | 0.0 |
| Breast Pool | 0.1 | 0.1 |
| Trachea | 0.3 | 0.2 |
| Lung | 0.0 | 0.0 |
| Fetal Lung | 2.9 | 2.8 |
| Lung ca. NCI-N417 | 0.0 | 0.0 |
| Lung ca. LX-1 | 0.7 | 0.7 |
| Lung ca. NCI-H146 | 0.0 | 0.0 |
| Lung ca. SHP-77 | 0.0 | 0.0 |
| Lung ca. A549 | 0.0 | 0.0 |
| Lung ca. NCI-H526 | 0.0 | 0.0 |
| Lung ca. NCI-H23 | 0.1 | 0.2 |
| Lung ca. NCI-H460 | 0.5 | 0.3 |
| Lung ca. HOP-62 | 0.6 | 0.8 |
| Lung ca. NCI-H522 | 0.0 | 0.1 |
| Liver | 0.0 | 0.0 |
| Fetal Liver | 0.3 | 0.3 |
| Liver ca. HepG2 | 0.0 | 0.0 |
| Kidney Pool | 0.1 | 0.1 |
| Fetal Kidney | 0.1 | 0.1 |
| Renal ca. 786-0 | 0.1 | 0.1 |
| Renal ca. A498 | 0.1 | 0.0 |
| Renal ca. ACHN | 0.0 | 0.1 |
| Renal ca. UO-31 | 0.8 | 1.0 |
| Renal ca. TK-10 | 0.0 | 0.0 |
| Bladder | 0.3 | 0.3 |
| Gastric ca. (liver met.) NCI-N87 | 0.3 | 0.3 |
| Gastric ca. KATO III | 0.1 | 0.1 |
| Colon ca. SW-948 | 0.0 | 0.0 |
| Colon ca. SW480 | 0.1 | 0.2 |
| Colon ca.* (SW480 met) SW620 | 0.0 | 0.0 |
| Colon ca. HT29 | 0.0 | 0.0 |
| Colon ca. HCT-116 | 0.0 | 0.0 |
| Colon ca. CaCo-2 | 0.1 | 0.1 |
| Colon cancer tissue | 8.2 | 9.4 |
| Colon ca. SW1116 | 0.0 | 0.0 |
| Colon ca. Colo-205 | 0.0 | 0.0 |
| Colon ca. SW-48 | 0.0 | 0.0 |
| Colon Pool | 0.1 | 0.0 |
| Small Intestine Pool | 0.0 | 0.1 |
| Stomach Pool | 2.0 | 1.5 |
| Bone Marrow Pool | 0.0 | 0.1 |
| Fetal Heart | 0.0 | 0.0 |
| Heart Pool | 0.0 | 0.0 |
| Lymph Node Pool | 0.0 | 0.0 |
| Fetal Skeletal Muscle | 0.0 | 0.0 |
| Skeletal Muscle Pool | 0.0 | 0.0 |
| Spleen Pool | 0.4 | 0.4 |
| Thymus Pool | 0.1 | 0.1 |
| CNS cancer (glio/astro) U87-MG | 100.0 | 100.0 |
| CNS cancer (glio/astro) U-118-MG | 0.3 | 0.3 |
| CNS cancer (neuro; met) SK-N-AS | 0.1 | 0.2 |
| CNS cancer (astro) SF-539 | 0.0 | 0.0 |
| CNS cancer (astro) SNB-75 | 0.1 | 0.1 |
| CNS cancer (glio) SNB-19 | 0.0 | 0.0 |
| CNS cancer (glio) SF-295 | 2.6 | 6.4 |
| Brain (Amygdala) Pool | 0.3 | 0.3 |
| Brain (cerebellum) | 0.1 | 0.1 |
| Brain (fetal) | 0.3 | 0.2 |
| Brain (Hippocampus) Pool | 1.0 | 0.9 |
| Cerebral Cortex Pool | 0.3 | 0.3 |
| Brain (Substantia nigra) Pool | 0.4 | 0.4 |
| Brain (Thalamus) Pool | 0.4 | 0.4 |
| Brain (whole) | 0.2 | 0.1 |
| Spinal Cord Pool | 0.4 | 0.4 |
| Adrenal Gland | 0.1 | 0.1 |
| Pituitary gland Pool | 0.0 | 0.0 |
| Salivary Gland | 0.1 | 0.1 |
| Thyroid (female) | 0.2 | 0.1 |
| Pancreatic ca. CAPAN2 | 0.1 | 0.1 |
| Pancreas Pool | 0.1 | 0.1 |

Column A - Rel. Exp. (%) Ag1141, Run 208030042
Column B - Rel. Exp. (%) Ag1141, Run 212141055

[0410] AI_comprehensive panel_v1.0 Summary: Ag1141/μg6369 Highest expression of this gene was detected in matched control sample for ulcerative colitis (CTs=27).

[0411] Significant expression of this gene was also seen in samples derived from normal and orthoarthitis/rheumatoid arthritis bone, cartilage, synovium and synovial fluid samples, from normal lung, COPD lung, emphysema, atopic asthma, asthma, Crohn's disease (normal matched control and diseased), ulcerative colitis(normal matched control and diseased), and psoriasis (normal matched control and diseased). Therefore, therapeutic modulation of this gene, encoded protein and/or use of antibodies or small molecule targeting this gene or gene product will ameliorate symptoms/conditions associated with autoimmune and inflammatory disorders including psoriasis, allergy, asthma, inflammatory bowel disease, rheumatoid arthritis and osteoarthritis.

[0412] Cellular OA/RA Summary: Ag1141 Highest expression of this gene was detected in TNF alpha treated MH7A (synoviocyte) cell line (CT=19.7). Expression of this gene was upregulated in activated normal osteoblast (Nhost), chondrocytes (SW1353 cell line) and synoviocyte cell lines. Therefore, modulation of this gene, encoded protein and/or use of antibodies or small molecule targeting this gene or gene product is useful in the treatment of inflammatory and autoimmune diseases such as osteoarthritis and rheumatoid arthritis.

[0413] General_screening_panel_v1.4 Summary: Ag1141 Highest expression of this gene was detected in a brain cancer U87-MG cell line (CT=20.9). High to moderate expression of this gene was also seen in number of cancer cell lines derived from pancreatic, gastric, colon, lung, liver, renal, breast, ovarian, prostate, squamous cell carcinoma, melanoma and brain cancers. Thus, expression levels of this gene is useful as marker to detect the presence of these cancers. Therapeutic modulation of this gene, encoded protein and/or use of small molecule targeting this gene or gene product is effective in the treatment of pancreatic, gastric, colon, lung, liver, renal, breast, ovarian, prostate, squamous cell carcinoma, melanoma and brain cancers.

[0414] Among tissues with metabolic or endocrine function, this gene was expressed at moderate levels in pancreas, adipose, adrenal gland, thyroid, pituitary gland, skeletal muscle, heart, liver and the gastrointestinal tract. Therefore, therapeutic modulation of this gene, encoded protein is useful in the treatment of endocrine/metabolically related diseases, such as obesity and diabetes.

[0415] This gene was expressed at moderate levels in all regions of the central nervous system examined, including amygdala, hippocampus, substantia nigra, thalamus, cerebellum, cerebral cortex, and spinal cord. Therapeutic modulation of this gene, encoded protein and/or use of antibodies or small molecule targeting this gene or gene product is useful in the treatment of central nervous system disorders such as Alzheimer's disease, Parkinson's disease, epilepsy, multiple sclerosis, schizophrenia and depression.

[0416] C. NOV3 (CG127616-01 and CG127616-02): FL_{—}104 aa (del 54-143aa) and Partial (del 1-4aa; 54-143aa) [Erythropoietin Precursor-like]

[0417] Expression of genes CG127616-01 and CG127616-02 was assessed using the primer-probe sets Ag4746 and Ag6361, described in Tables CA and CB. Results of the RTQ-PCR runs are shown in Tables CC and CD.

TABLE CA

Probe Name Ag4746

| | | | Start | SEQ ID |
|---|---|---|---|---|
| Primers | Sequences | Length | Position | No |
| Forward | 5′-gaatatcacgaaggaagcca-3′ | 20 | 155 | 226 |
| Probe | TET-5′-cctcagctgctccactccgaaca-3′- | 23 | 193 | 227 |
| | TAMRA | | | |
| Reverse | 5′-cggaaagtgtcagcagtgat-3′ | 20 | 216 | 228 |

[0418] TABLE CB

Probe Name Ag6361

| | | | Start | SEQ ID |
|---|---|---|---|---|
| Primers | Sequences | Length | Position | No |
| Forward | 5′-acaatcactgctgacactttcc-3′ | 22 | 213 | 229 |
| Probe | TET-5′-ttccgagtctactccaatttcctccg-3′- | 26 | 243 | 230 |
| | TAMRA | | | |
| Reverse | 5′-cctgtgtacagcttcagctttc-3′ | 22 | 271 | 231 |

[0419] TABLE CC
General_screening_panel_v1.4

| Tissue Name | A |
|---|---|
| Adipose | 0.0 |
| Melanoma* Hs688(A).T | 0.0 |
| Melanoma* Hs688(B).T | 0.0 |
| Melanoma* M14 | 0.0 |
| Melanoma* LOXIMVI | 0.0 |
| Melanoma* SK-MEL-5 | 0.0 |
| Squamous cell carcinoma SCC-4 | 0.6 |
| Testis Pool | 0.8 |
| Prostate ca.* (bone met) PC-3 | 0.6 |
| Prostate Pool | 1.0 |
| Placenta | 1.4 |
| Uterus Pool | 2.8 |
| Ovarian ca. OVCAR-3 | 1.3 |
| Ovarian ca. SK-OV-3 | 0.2 |
| Ovarian ca. OVCAR-4 | 0.0 |
| Ovarian ca. OVCAR-5 | 0.3 |
| Ovarian ca. IGROV-1 | 0.0 |
| Ovarian ca. OVCAR-8 | 1.5 |
| Ovary | 0.0 |
| Breast ca. MCF-7 | 0.0 |
| Breast ca. MDA-MB-231 | 3.7 |
| Breast ca. BT 549 | 3.1 |
| Breast ca. T47D | 0.4 |
| Breast ca. MDA-N | 0.0 |
| Breast Pool | 4.9 |
| Trachea | 0.0 |
| Lung | 1.0 |
| Fetal Lung | 0.2 |
| Lung ca. NCI-N417 | 0.0 |
| Lung ca. LX-1 | 1.1 |
| Lung ca. NCI-H146 | 1.1 |
| Lung ca. SHP-77 | 0.3 |
| Lung ca. A549 | 0.0 |
| Lung ca. NCI-H526 | 0.0 |
| Lung ca. NCI-H23 | 18.0 |
| Lung ca. NCI-H460 | 0.2 |
| Lung ca. HOP-62 | 0.0 |
| Lung ca. NCI-H522 | 0.0 |
| Liver | 0.0 |
| Fetal Liver | 18.8 |
| Liver ca. HepG2 | 100.0 |
| Kidney Pool | 4.9 |
| Fetal Kidney | 1.0 |
| Renal ca. 786-0 | 1.3 |
| Renal ca. A498 | 0.5 |
| Renal ca. ACHN | 0.4 |
| Renal ca. UO-31 | 0.0 |
| Renal ca. TK-10 | 27.4 |
| Bladder | 29.1 |
| Gastric ca. (liver met.) NCI-N87 | 1.2 |
| Gastric ca. KATO III | 0.0 |
| Colon ca. SW-948 | 0.5 |
| Colon ca. SW480 | 0.2 |
| Colon ca.* (SW480 met) SW620 | 0.0 |
| Colon ca. HT29 | 0.0 |
| Colon ca. HCT-116 | 2.4 |
| Colon ca. CaCo-2 | 33.2 |
| Colon cancer tissue | 0.0 |
| Colon ca. SW1116 | 0.0 |
| Colon ca. Colo-205 | 0.0 |
| Colon ca. SW-48 | 0.4 |
| Colon Pool | 12.3 |
| Small Intestine Pool | 0.2 |
| Stomach Pool | 5.8 |
| Bone Marrow Pool | 1.9 |
| Fetal Heart | 0.0 |
| Heart Pool | 0.7 |
| Lymph Node Pool | 14.5 |
| Fetal Skeletal Muscle | 0.0 |
| Skeletal Muscle Pool | 0.0 |
| Spleen Pool | 0.2 |
| Thymus Pool | 1.3 |
| CNS cancer (glio/astro) U87-MG | 1.6 |
| CNS cancer (glio/astro) U-118-MG | 0.0 |
| CNS cancer (neuro; met) SK-N-AS | 0.2 |
| CNS cancer (astro) SF-539 | 0.0 |
| CNS cancer (astro) SNB-75 | 0.2 |
| CNS cancer (glio) SNB-19 | 0.0 |
| CNS cancer (glio) SF-295 | 1.4 |
| Brain (Amygdala) Pool | 0.0 |
| Brain (cerebellum) | 0.1 |
| Brain (fetal) | 1.1 |
| Brain (Hippocampus) Pool | 0.4 |
| Cerebral Cortex Pool | 0.0 |
| Brain (Substantia nigra) Pool | 6.1 |
| Brain (Thalamus) Pool | 0.0 |
| Brain (whole) | 4.8 |
| Spinal Cord Pool | 0.0 |
| Adrenal Gland | 0.0 |
| Pituitary gland Pool | 0.0 |
| Salivary Gland | 0.0 |
| Thyroid (female) | 0.0 |
| Pancreatic ca. CAPAN2 | 0.0 |
| Pancreas Pool | 7.7 |

Column A - Rel. Exp. (%) Ag4746, Run 214145483

[0420] TABLE CD
general oncology screening panel_v_2.4

| Tissue Name | A |
|---|---|
| Colon cancer 1 | 0.0 |
| Colon NAT 1 | 0.0 |
| Colon cancer 2 | 0.0 |
| Colon NAT 2 | 0.0 |
| Colon cancer 3 | 0.0 |
| Colon NAT 3 | 0.0 |
| Colon malignant cancer 4 | 0.0 |
| Colon NAT 4 | 0.0 |
| Lung cancer 1 | 0.0 |
| Lung NAT 1 | 0.0 |
| Lung cancer 2 | 0.0 |
| Lung NAT 2 | 0.0 |
| Squamous cell carcinoma 3 | 1.7 |
| Lung NAT 3 | 0.0 |
| Metastatic melanoma 1 | 1.0 |
| Melanoma 2 | 0.0 |
| Melanoma 3 | 0.0 |
| Metastatic melanoma 4 | 0.6 |
| Metastatic melanoma 5 | 0.0 |
| Bladder cancer 1 | 0.0 |
| Bladder NAT 1 | 0.8 |
| Bladder cancer 2 | 0.0 |
| Bladder NAT 2 | 0.0 |
| Bladder NAT 3 | 0.0 |
| Bladder NAT 4 | 0.0 |
| Prostate adenocarcinoma 1 | 5.8 |
| Prostate adenocarcinoma 2 | 0.6 |
| Prostate adenocarcinoma 3 | 0.0 |
| Prostate adenocarcinoma 4 | 0.0 |
| Prostate NAT 5 | 0.0 |
| Prostate adenocarcinoma 6 | 0.0 |
| Prostate adenocarcinoma 7 | 0.0 |
| Prostate adenocarcinoma 8 | 0.0 |
| Prostate adenocarcinoma 9 | 0.0 |
| Prostate NAT 10 | 0.0 |
| Kidney cancer 1 | 71.2 |
| Kidney NAT 1 | 0.0 |
| Kidney cancer 2 | 0.0 |
| Kidney NAT 2 | 0.9 |
| Kidney cancer 3 | 1.1 |
| Kidney NAT 3 | 0.0 |
| Kidney cancer 4 | 100.0 |
| Kidney NAT 4 | 0.0 |

Column A - Rel. Exp. (%) Ag4746, Run 259807104

[0421] General_screening_panel_v1.4 Summary: Ag4746 Highest expression of this gene was seen in a liver cancer cell line (CT=30.3). Moderate levels of expression were also seen in colon, renal and lung cancer cell lines, with low but significant expression detectable in lymph node and fetal liver. The transcript for this gene encodes a putative variant of erythropoietin (Epo), which is produced in the kidney and liver of normal adults. Human erythropoietin (Epo) is an acidic glycoprotein hormone that mediates the production of red blood cells, promotes erythroid differentiation, initiates hemoglobin synthesis. In addition, Epo has been shown to be a potent growth factor for the development of red blood cells from hematopoetic stem cells. Thus, the expression in hematopoietic tissues in this panel is consistent with the characterization of this novel protein as a novel variant of Epo. Modulation of the expression or function of this gene product is useful in the treatment of hematopoietic disorders.

[0422] general oncology screening panel_v_{—}2.4 Summary: Ag4746 Moderate expression of this gene was seen in two samples derived from kidney cancers (CTs=32). The expression of this gene is useful as a marker for kidney cancer.

[0423] D. NOV4 (CG54455-03 and CG54455-07): FGF-10X

[0424] Expression of genes CG54455-03 and CG54455-07 was assessed using the primer-probe sets Ag4346, Ag4347 and Ag7772, described in Tables DA, DB and DC. Results of the RTQ-PCR runs are shown in Tables DD, DE, DF, DG, DH, DI, DJ and DK.

TABLE DA

Probe Name Ag4346

| | | | Start | SEQ ID |
|---|---|---|---|---|
| Primers | Sequences | Length | Position | No |
| Forward | 5′-cgtggtcatcaaagcagtgt-3′ | 20 | 249 | 232 |
| Probe | TET-5′-ctcaggcttctacgtggccatgaac-3′- | 25 | 270 | 233 |
| | TAMRA | | | |
| Reverse | 5′-tgcagtccacggtgtagagt-3′ | 20 | 321 | 234 |

[0425] TABLE DB

Probe Name Ag4347

| | | | Start | SEQ ID |
|---|---|---|---|---|
| Primers | Sequences | Length | Position | No |
| Forward | 5′-tggagatccgctctgtacacg-3′ | 21 | 221 | 235 |
| Probe | TET-5′-cctgaggacactgctttgatgaccacg-3′- | 27 | 249 | 236 |
| | TAMRA | | | |
| Reverse | 5′-cggttcatggccacgtaga-3′ | 19 | 278 | 237 |

[0426] TABLE DC

Probe Name Ag7772

| | | | | |
|---|---|---|---|---|
| | | | Start | SEQ ID |
| Primers | Sequences | Length | Position | No |

| | | | | |
|---|---|---|---|---|
| Forward | 5′-tggagatccgctctgtacac-3′ | 20 | 221 | 238 |
| Probe | TET-5′-tcatcaaagcagtgtcctcaggcttc-3′- | 26 | 254 | 239 |
| | TAMRA | | | |
| Reverse | 5′-tgcagtccacggtgtagagt-3′ | 20 | 321 | 240 |

[0427] TABLE DD
AI_comprehensive panel_v1.0

| Tissue Name | A |
|---|---|
| 110967 COPD-F | 10.0 |
| 110980 COPD-F | 19.2 |
| 110968 COPD-M | 13.3 |
| 110977 COPD-M | 59.5 |
| 110989 Emphysema-F | 16.4 |
| 110992 Emphysema-F | 14.3 |
| 110993 Emphysema-F | 6.2 |
| 110994 Emphysema-F | 4.1 |
| 110995 Emphysema-F | 19.3 |
| 110996 Emphysema-F | 9.3 |
| 110997 Asthma-M | 1.7 |
| 111001 Asthma-F | 4.5 |
| 111002 Asthma-F | 15.7 |
| 111003 Atopic Asthma-F | 14.0 |
| 111004 Atopic Asthma-F | 21.5 |
| 111005 Atopic Asthma-F | 6.4 |
| 111006 Atopic Asthma-F | 5.1 |
| 111417 Allergy-M | 18.7 |
| 112347 Allergy-M | 4.8 |
| 112349 Normal Lung-F | 2.7 |
| 112357 Normal Lung-F | 100.0 |
| 112354 Normal Lung-M | 8.3 |
| 112374 Crohns-F | 19.9 |
| 112389 Match Control Crohns-F | 33.9 |
| 112375 Crohns-F | 6.7 |
| 112732 Match Control Crohns-F | 31.4 |
| 112725 Crohns-M | 9.1 |
| 112387 Match Control Crohns-M | 2.2 |
| 112378 Crohns-M | 4.3 |
| 112390 Match Control Crohns-M | 28.7 |
| 112726 Crohns-M | 1.4 |
| 112731 Match Control Crohns-M | 15.3 |
| 112380 Ulcer Col-F | 4.4 |
| 112734 Match Control Ulcer Col-F | 18.8 |
| 112384 Ulcer Col-F | 7.0 |
| 112737 Match Control Ulcer Col-F | 1.2 |
| 112386 Ulcer Col-F | 19.6 |
| 112738 Match Control Ulcer Col-F | 1.0 |
| 112381 Ulcer Col-M | 0.0 |
| 112735 Match Control Ulcer Col-M | 0.0 |
| 112382 Ulcer Col-M | 7.1 |
| 112394 Match Control Ulcer Col-M | 11.9 |
| 112383 Ulcer Col-M | 8.4 |
| 112736 Match Control Ulcer Col-M | 29.1 |
| 112423 Psoriasis-F | 1.0 |
| 112427 Match Control Psoriasis-F | 60.3 |
| 112418 Psoriasis-M | 12.1 |
| 112723 Match Control Psoriasis-M | 0.8 |
| 112419 Psoriasis-M | 4.9 |
| 112424 Match Control Psoriasis-M | 15.7 |
| 112420 Psoriasis-M | 15.2 |
| 112425 Match Control Psoriasis-M | 30.1 |
| 104689 (MF) OA Bone-Backus | 21.5 |
| 104690 (MF) Adj “Normal” Bone-Backus | 10.9 |
| 104691 (MF) OA Synovium-Backus | 11.4 |
| 104692 (BA) OA Cartilage-Backus | 27.4 |
| 104694 (BA) OA Bone-Backus | 5.4 |
| 104695 (BA) Adj “Normal” Bone-Backus | 36.1 |
| 104696 (BA) OA Synovium-Backus | 2.0 |
| 104700 (SS) OA Bone-Backus | 4.7 |
| 104701 (SS) Adj “Normal” Bone-Backus | 15.0 |
| 104702 (SS) OA Synovium-Backus | 10.6 |
| 117093 OA Cartilage Rep7 | 7.2 |
| 112672 OA Bone5 | 2.5 |
| 112673 OA Synovium5 | 3.4 |
| 112674 OA Synovial Fluid cells5 | 9.9 |
| 117100 OA Cartilage Rep14 | 2.7 |
| 112756 OA Bone9 | 18.7 |
| 112757 OA Synovium9 | 4.3 |
| 112758 OA Synovial Fluid Cells9 | 4.7 |
| 117125 RA Cartilage Rep2 | 3.1 |
| 113492 Bone2 RA | 5.8 |
| 113493 Synovium2 RA | 1.8 |
| 113494 Syn Fluid Cells RA | 8.0 |
| 113499 Cartilage4 RA | 2.6 |
| 113500 Bone4 RA | 10.4 |
| 113501 Synovium4 RA | 5.6 |
| 113502 Syn Fluid Cells4 RA | 5.3 |
| 113495 Cartilage3 RA | 5.9 |
| 113496 Bone3 RA | 3.5 |
| 113497 Synovium3 RA | 0.4 |
| 113498 Syn Fluid Cells3 RA | 1.6 |
| 117106 Normal Cartilage Rep20 | 4.2 |
| 113663 Bone3 Normal | 0.0 |
| 113664 Synovium3 Normal | 0.0 |
| 113665 Syn Fluid Cells3 Normal | 3.6 |
| 117107 Normal Cartilage Rep22 | 3.3 |
| 113667 Bone4 Normal | 10.7 |
| 113668 Synovium4 Normal | 16.4 |
| 113669 Syn Fluid Cells4 Normal | 4.2 |

Column A - Rel. Exp. (%) Ag4347, Run 278182082

[0428] TABLE DE
Cellular OA/RA

| Tissue Name | A |
|---|---|
| 158667 Nhost medium 1 h | 8.5 |
| 158670 Nhost + IL-1b (10 ng/ml), 1 h | 3.5 |
| 158673 Nhost + PGE2 (10-6M) 1 h | 18.2 |
| 158668 Nhost medium alone 6 h | 26.6 |
| 158671 Nhost + IL-1b (10 ng/ml) 6 h | 29.3 |
| 158674 Nhost + PGE2 (10-6M) 6 h | 2.3 |
| 158669 Nhost medium alone 24 h | 0.0 |
| 158672 Nhost + IL-1b (10 ng/ml) 24 h | 33.7 |
| 158675 Nhost + PGE2 (10-6M) 24 h | 41.5 |
| 164327 SW1353 medium alone 1 h | 66.0 |
| 164328 SW1353 + IL-1b (1 ng/ml) 1 h | 22.5 |
| 164329 SW1353 + IL-1b (10 ng/ml) 1 h | 26.8 |
| 164330 SW1353 + TNF-a (10 ng/ml) 1 h | 20.4 |
| 164331 SW1353 + TNF-a (100 ng/ml) 1 h | 51.1 |
| 164332 SW1353 medium alone 6 h | 42.6 |
| 164333 SW1353 + IL-1b (1 ng/ml) 6 h | 41.5 |
| 164334 SW1353 + IL-1b (10 ng/ml) 6 h | 88.3 |
| 164335 SW1353 + TNF-a (10 ng/ml) 6 h | 34.4 |
| 164336 SW1353 + TNF-a (100 ng/ml) 6 h | 24.5 |
| 164337 SW1353 medium alone 18 h | 49.7 |
| 164338 SW1353 + IL-1b (1 ng/ml) 18 h | 38.2 |
| 164339 SW1353 + IL-1b (10 ng/ml) 18 h | 34.9 |
| 164340 SW1353 + TNF-a (10 ng/ml) 18 h | 19.9 |
| 164341 SW1353 + IL-1b (100 ng/ml) 18 h | 55.1 |
| 173326 HFLS-RA (cell application) medium alone 18 h | 12.2 |
| 173327 HFLS-RA (cell application) + TNF-a 18 h | 36.9 |
| 173331 MH7A (synoviocyte cell line) medium 1 h | 36.6 |
| 173332 MH7A (synoviocyte cell line) + IL1b 1 h | 15.3 |
| 173334 MH7A (synoviocyte cell line) TNFa 1 h | 0.0 |
| 173336 MH7A (synoviocyte cell line) medium alone 6 h | 100.0 |
| 173339 MH7A (synoviocyte cell line) + IL1b 6 h | 77.9 |
| 173341 MH7A (synoviocyte cell line) TNFa 6 h | 7.6 |
| 173342 MH7A (synoviocyte cell line) medium alone 18 h | 15.1 |
| 173344 MH7A (synoviocyte cell line) + IL1b 18 h | 30.8 |
| 173346 MH7A (synoviocyte cell line) TNF-a 18 h | 25.2 |

Column A - Rel. Exp. (%) Ag4346, Run 406013342

[0429] TABLE DF
General_screening_panel_v1.4

| Tissue Name | A |
|---|---|
| Adipose | 0.0 |
| Melanoma* Hs688(A).T | 0.0 |
| Melanoma* Hs688(B).T | 3.2 |
| Melanoma* M14 | 5.6 |
| Melanoma* LOXIMVI | 3.7 |
| Melanoma* SK-MEL-5 | 2.3 |
| Squamous cell carcinoma SCC-4 | 0.0 |
| Testis Pool | 20.4 |
| Prostate ca.* (bone met) PC-3 | 5.9 |
| Prostate Pool | 2.1 |
| Placenta | 18.9 |
| Uterus Pool | 2.5 |
| Ovarian ca. OVCAR-3 | 8.6 |
| Ovarian ca. SK-OV-3 | 100.0 |
| Ovarian ca. OVCAR-4 | 7.4 |
| Ovarian ca. OVCAR-5 | 41.8 |
| Ovarian ca. IGROV-1 | 13.3 |
| Ovarian ca. OVCAR-8 | 27.4 |
| Ovary | 27.4 |
| Breast ca. MCF-7 | 0.0 |
| Breast ca. MDA-MB-231 | 17.1 |
| Breast ca. BT 549 | 10.0 |
| Breast ca. T47D | 83.5 |
| Breast ca. MDA-N | 10.2 |
| Breast Pool | 4.5 |
| Trachea | 14.4 |
| Lung | 0.0 |
| Fetal Lung | 0.0 |
| Lung ca. NCI-N417 | 2.5 |
| Lung ca. LX-1 | 15.7 |
| Lung ca. NCI-H146 | 0.0 |
| Lung ca. SHP-77 | 14.0 |
| Lung ca. A549 | 6.8 |
| Lung ca. NCI-H526 | 4.4 |
| Lung ca. NCI-H23 | 17.1 |
| Lung ca. NCI-H460 | 0.0 |
| Lung ca. HOP-62 | 8.8 |
| Lung ca. NCI-H522 | 12.9 |
| Liver | 1.2 |
| Fetal Liver | 0.0 |
| Liver ca. HepG2 | 5.1 |
| Kidney Pool | 13.6 |
| Fetal Kidney | 8.6 |
| Renal ca. 786-0 | 11.5 |
| Renal ca. A498 | 3.5 |
| Renal ca. ACHN | 8.2 |
| Renal ca. UO-31 | 0.0 |
| Renal ca. TK-10 | 15.2 |
| Bladder | 4.3 |
| Gastric ca. (liver met.) NCI-N87 | 8.7 |
| Gastric ca. KATO III | 3.7 |
| Colon ca. SW-948 | 1.7 |
| Colon ca. SW480 | 11.1 |
| Colon ca.* (SW480 met) SW620 | 12.6 |
| Colon ca. HT29 | 4.7 |
| Colon ca. HCT-116 | 40.1 |
| Colon ca. CaCo-2 | 3.6 |
| Colon cancer tissue | 0.0 |
| Colon ca. SW1116 | 29.7 |
| Colon ca. Colo-205 | 0.0 |
| Colon ca. SW-48 | 0.0 |
| Colon Pool | 3.9 |
| Small Intestine Pool | 10.5 |
| Stomach Pool | 3.7 |
| Bone Marrow Pool | 18.2 |
| Fetal Heart | 0.0 |
| Heart Pool | 1.1 |
| Lymph Node Pool | 17.4 |
| Fetal Skeletal Muscle | 0.0 |
| Skeletal Muscle Pool | 9.3 |
| Spleen Pool | 5.1 |
| Thymus Pool | 9.9 |
| CNS cancer (glio/astro) U87-MG | 14.6 |
| CNS cancer (glio/astro) U-118-MG | 32.3 |
| CNS cancer (neuro; met) SK-N-AS | 15.7 |
| CNS cancer (astro) SF-539 | 3.6 |
| CNS cancer (astro) SNB-75 | 8.7 |
| CNS cancer (glio) SNB-19 | 3.9 |
| CNS cancer (glio) SF-295 | 54.3 |
| Brain (Amygdala) Pool | 70.7 |
| Brain (cerebellum) | 26.1 |
| Brain (fetal) | 40.3 |
| Brain (Hippocampus) Pool | 34.4 |
| Cerebral Cortex Pool | 52.5 |
| Brain (Substantia nigra) Pool | 53.6 |
| Brain (Thalamus) Pool | 57.8 |
| Brain (whole) | 31.9 |
| Spinal Cord Pool | 34.9 |
| Adrenal Gland | 1.3 |
| Pituitary gland Pool | 2.1 |
| Salivary Gland | 7.4 |
| Thyroid (female) | 0.0 |
| Pancreatic ca. CAPAN2 | 1.8 |
| Pancreas Pool | 0.0 |

Column A - Rel. Exp. (%) Ag4347, Run 222523511

[0430] TABLE DG
Mini tissue OA/RA

| Tissue Name | A |
|---|---|
| 161315 OA PT 5 Cartilage | 2.4 |
| 161291 OA PT 7 Cartilage | 0.4 |
| 161303 OA PT 8 Cartilage | 0.8 |
| 161287 OA PT 10 Cartilage | 0.4 |
| 173546 RA Cartilage PT 85 | 3.4 |
| 161316 OA PT 5 Synovium | 0.4 |
| 161290 OA PT 7 Synovium | 1.3 |
| 161304 OA PT 8 Synovium | 0.5 |
| 161289 OA PT 10 Synovium | 2.7 |
| 161237 RA PT 1 Synovium | 1.8 |
| 173547 RA PT 85 Synovium | 5.0 |
| 173553 RA Synovium Ardais RNA 1 | 6.8 |
| 173554 RA Synovium Ardais RNA 2 | 1.8 |
| 173543 Normal Synovium 1 NDRI | 5.6 |
| 173545 Normal Synovium 3 NDRI | 2.1 |
| 173555 Normal Synovium Ardais RNA 1 | 20.6 |
| 161314 OA PT 5 Bone | 2.4 |
| 161292 OA PT 7 Bone | 2.0 |
| 161302 OA PT 8 Bone | 1.1 |
| 161288 OA PT 10 Bone | 3.6 |
| 173548 RA PT 85 Bone | 0.6 |
| 150168 Adrenal gland | 4.2 |
| 150171 Brain (whole) | 100.0 |
| 154975 Colon | 4.4 |
| 154947 Heart | 0.0 |
| 155689 Kidney pool | 8.4 |
| 150176 Lung* | 2.9 |
| 150178 Ovary* | 7.9 |
| 144488 Skeletal muscle pool* | 0.0 |
| 154967 Small intestine | 8.0 |
| 154970 Stomach* | 0.6 |

Column A - Rel. Exp. (%) Ag4346, Run 406107070

[0431] TABLE DH
PGI1.0

| Tissue Name | A |
|---|---|
| 162191 Normal Lung 1 (IBS) | 0.5 |
| 162570 Normal Lung 4 (Aastrand) | 0.0 |
| 160468 MD lung | 0.0 |
| 156629 MD Lung 13 | 0.0 |
| 162571 Normal Lung 3 (Aastrand) | 0.4 |
| 162186 Fibrosis Lung 1 (Genomic Collaborative) | 100.0 |
| 162187 Fibrosis Lung 2 (Genomic Collaborative) | 47.6 |
| 151281 Fibrosis lung 11(Ardais) | 3.5 |
| 162190 Asthma Lung 4 (Genomic Collaborative) | 33.2 |
| 160467 Asthma Lung 13 (MD) | 0.0 |
| 137027 Emphysema Lung 1 (Ardais) | 0.0 |
| 137028 Emphysema Lung 2 (Ardais) | 3.7 |
| 137040 Emphysema Lung 3 (Ardais) | 2.8 |
| 137041 Emphysema Lung 4 (Ardais) | 0.0 |
| 137043 Emphysema Lung 5 (Ardais) | 0.5 |
| 142817 Emphysema Lung 6 (Ardais) | 1.9 |
| 142818 Emphysema Lung 7 (Ardais) | 2.6 |
| 142819 Emphysema Lung 8 (Ardais) | 5.9 |
| 142820 Emphysema Lung 9 (Ardais) | 2.0 |
| 142821 Emphysema Lung 10 (Ardais) | 1.1 |
| 162185 Emphysema Lung 12 (Ardais) | 0.0 |
| 162184 Emphysema Lung 13 (Ardais) | 1.1 |
| 162183 Emphysema Lung 14 (Ardais) | 6.6 |
| 162188 Emphysema Lung 15 (Genomic Collaborative) | 82.4 |
| 162177 NAT UC Colon 1(Ardais) | 0.4 |
| 162176 UC Colon 1(Ardais) | 0.0 |
| 162179 NAT UC Colon 2(Ardais) | 0.0 |
| 162178 UC Colon 2(Ardais) | 0.0 |
| 162181 NAT UC Colon 3(Ardais) | 0.9 |
| 162180 UC Colon 3(Ardais) | 0.2 |
| 162182 NAT UC Colon 4 (Ardais) | 3.1 |
| 137042 UC Colon 1108 | 0.0 |
| 137029 UC Colon 8215 | 0.6 |
| 137031 UC Colon 8217 | 0.6 |
| 137036 UC Colon 1137 | 1.1 |
| 137038 UC Colon 1491 | 0.8 |
| 137039 UC Colon 1546 | 0.7 |
| 162594 NAT Crohn's 47751 (NDRI) | 0.0 |
| 162593 Crohn's 47751 (NDRI) | 0.0 |

Column A - Rel. Exp. (%) Ag4346, Run 416198456

[0432] TABLE DI
Panel 3D

| Tissue Name | A |
|---|---|
| 94905 Daoy Medulloblastoma/Cerebellum | 0.0 |
| 94906 TE671 Medulloblastom/Cerebellum | 0.0 |
| 94907 D283 Med Medulloblastoma/Cerebellum | 7.7 |
| 94908 PFSK-1 Primitive | 3.7 |
| Neuroectodermal/Cerebellum | |
| 94909 XF-498 CNS | 0.0 |
| 94910 SNB-78 CNS/glioma | 27.9 |
| 94911 SF-268 CNS/glioblastoma | 0.0 |
| 94912 T98G Glioblastoma | 0.0 |
| 96776 SK-N-SH Neuroblastoma (metastasis) | 3.5 |
| 94913 SF-295 CNS/glioblastoma | 19.3 |
| 94914 Cerebellum | 15.1 |
| 96777 Cerebellum | 14.9 |
| 94916 NCI-H292 Mucoepidermoid | 14.1 |
| lung carcinoma | |
| 94917 DMS-114 Small cell lung cancer | 63.7 |
| 94918 DMS-79 Small cell lung | 100.0 |
| cancer/neuroendocrine | |
| 94919 NCI-H146 Small cell lung | 7.4 |
| cancer/neuroendocrine | |
| 94920 NCI-H526 Small cell lung | 1.2 |
| cancer/neuroendocrine | |
| 94921 NCI-N417 Small cell lung | 0.0 |
| cancer/neuroendocrine | |
| 94923 NCI-H82 Small cell lung | 0.0 |
| cancer/neuroendocrine | |
| 94924 NCI-H157 Squamous cell lung | 0.0 |
| cancer (metastasis) | |
| 94925 NCI-H1155 Large cell lung | 4.5 |
| cancer/neuroendocrine | |
| 94926 NCI-H1299 Large cell lung | 0.0 |
| cancer/neuroendocrine | |
| 94927 NCI-H727 Lung carcinoid | 0.0 |
| 94928 NCI-UMC-11 Lung carcinoid | 0.0 |
| 94929 LX-1 Small cell lung cancer | 0.0 |
| 94930 Colo-205 Colon cancer | 0.0 |
| 94931 KM12 Colon cancer | 0.0 |
| 94932 KM20L2 Colon cancer | 0.0 |
| 94933 NCI-H716 Colon cancer | 28.3 |
| 94935 SW-48 Colon adenocarcinoma | 7.2 |
| 94936 SW1116 Colon adenocarcinoma | 11.0 |
| 94937 LS 174T Colon adenocarcinoma | 13.5 |
| 94938 SW-948 Colon adenocarcinoma | 0.0 |
| 94939 SW-480 Colon adenocarcinoma | 0.0 |
| 94940 NCI-SNU-5 Gastric carcinoma | 10.5 |
| KATO III- Gastric carcinoma | 29.1 |
| 94943 NCI-SNU-16 Gastric carcinoma | 0.0 |
| 94944 NCI-SNU-1 Gastric carcinoma | 7.5 |
| 94946 RF-1 Gastric adenocarcinoma | 0.0 |
| 94947 RF-48 Gastric adenocarcinoma | 0.0 |
| 96778 MKN-45 Gastric carcinoma | 23.2 |
| 94949 NCI-N87 Gastric carcinoma | 0.0 |
| 94951 OVCAR-5 Ovarian carcinoma | 0.0 |
| 94952 RL95-2 Uterine carcinoma | 0.0 |
| 94953 HelaS3 Cervical adenocarcinoma | 0.0 |
| 94954 Ca Ski Cervical epidermoid | 0.0 |
| carcinoma (metastasis | |
| 94955 ES-2 Ovarian clear cell carcinoma | 0.0 |
| 94957 Ramos Stimulated with | 0.0 |
| PMA/ionomycin 6 h | |
| 94958 Ramos Stimulated with | 0.0 |
| PMA/ionomycin 14 h | |
| 94962 MEG-01 Chronic myelogenous | 0.0 |
| leukemia (megokaryoblast) | |
| 94963 Raji Burkitt's lymphoma | 7.1 |
| 94964 Daudi Burkitt's lymphoma | 5.7 |
| 94965 U266 B-cell plasmacytoma/myeloma | 0.0 |
| 94968 CA46 Burkitt's lymphoma | 6.7 |
| 94970 RL non-Hodgkin's B-cell lymphoma | 0.0 |
| 94972 JM1 pre-B-cell lymphoma/leukemia | 0.0 |
| 94973 Jurkat T cell leukemia | 0.0 |
| 94974 TF-1 Erythroleukemia | 0.0 |
| 94975 HUT 78 T-cell lymphoma | 0.0 |
| 94977 U937 Histiocytic lymphoma | 0.0 |
| 94980 KU-812 Myelogenous leukemia | 14.0 |
| 769-P- Clear cell renal carcinoma | 13.8 |
| 94983 Caki-2 Clear cell renal carcinoma | 0.0 |
| 94984 SW 839 Clear cell renal carcinoma | 19.6 |
| 94986 G401 Wilms' tumor | 7.8 |
| 94987 Hs766T Pancreatic carcinoma | 6.8 |
| (LN metastasis) | |
| 94988 CAPAN-1 Pancreatic | 0.0 |
| adenocarcinoma (liver metastasis) | |
| 94989 SU86.86 Pancreatic carcinoma | 0.0 |
| (liver metastasis) | |
| 94990 BxPC-3 Pancreatic adenocarcinoma | 0.0 |
| 94991 HPAC Pancreatic adenocarcinoma | 0.0 |
| 94992 MIA PaCa-2 Pancreatic carcinoma | 0.0 |
| 94993 CFPAC-1 Pancreatic ductal | 20.4 |
| adenocarcinoma | |
| 94994 PANC-1 Pancreatic epithelioid | 0.0 |
| ductal carcinoma | |
| 94996 T24 Bladder carcinoma | 19.9 |
| (transitional cell | |
| 5637- Bladder carcinoma | 0.0 |
| 94998 HT-1197 Bladder carcinoma | 0.0 |
| 94999 UM-UC-3 Bladder carcinoma | 0.0 |
| (transitional cell) | |
| 95000 A204 Rhabdomyosarcoma | 14.4 |
| 95001 HT-1080 Fibrosarcoma | 0.0 |
| 95002 MG-63 Osteosarcoma (bone) | 0.0 |
| 95003 SK-LMS-1 Leiomyosarcoma (vulva) | 8.2 |
| 95004 SJRH30 Rhabdomyosarcoma | 0.0 |
| (met to bone marrow) | |
| 95005 A431 Epidermoid carcinoma | 0.0 |
| 95007 WM266-4 Melanoma | 5.2 |
| DU 145- Prostate carcinoma (brain metastasis) | 0.0 |
| 95012 MDA-MB-468 Breast adenocarcinoma | 0.0 |
| SCC-4- Squamous cell carcinoma of tongue | 0.0 |
| SCC-9- Squamous cell carcinoma of tongue | 0.0 |
| SCC-15- Squamous cell carcinoma of tongue | 0.0 |
| 95017 CAL 27 Squamous cell | 6.7 |
| carcinoma of tongue | |

Column A - Rel. Exp. (%) Ag4347, Run 190952231

[0433] TABLE DJ
Panel 4.1D

| Tissue Name | A |
|---|---|
| Secondary Th1 act | 0.0 |
| Secondary Th2 act | 0.0 |
| Secondary Tr1 act | 0.0 |
| Secondary Th1 rest | 0.0 |
| Secondary Th2 rest | 0.0 |
| Secondary Tr1 rest | 0.0 |
| Primary Th1 act | 0.0 |
| Primary Th2 act | 0.0 |
| Primary Tr1 act | 0.0 |
| Primary Th1 rest | 0.0 |
| Primary Th2 rest | 0.0 |
| Primary Tr1 rest | 0.0 |
| CD45RA CD4 lymphocyte act | 0.0 |
| CD45RO CD4 lymphocyte act | 0.0 |
| CD8 lymphocyte act | 0.0 |
| Secondary CD8 lymphocyte rest | 0.0 |
| Secondary CD8 lymphocyte act | 0.0 |
| CD4 lymphocyte none | 0.0 |
| 2ry Th1/Th2/Tr1 anti-CD95 CH11 | 3.3 |
| LAK cells rest | 0.7 |
| LAK cells IL-2 | 0.0 |
| LAK cells IL-2 + IL-12 | 0.0 |
| LAK cells IL-2 + IFN gamma | 0.0 |
| LAK cells IL-2 + IL-18 | 0.0 |
| LAK cells PMA/ionomycin | 0.0 |
| NK Cells IL-2 rest | 0.0 |
| Two Way MLR 3 day | 0.0 |
| Two Way MLR 5 day | 0.0 |
| Two Way MLR 7 day | 2.3 |
| PBMC rest | 0.0 |
| PBMC PWM | 1.3 |
| PBMC PHA-L | 0.0 |
| Ramos (B cell) none | 0.0 |
| Ramos (B cell) ionomycin | 0.0 |
| B lymphocytes PWM | 0.0 |
| B lymphocytes CD40L and IL-4 | 0.0 |
| EOL-1 dbcAMP | 0.0 |
| EOL-1 dbcAMP PMA/ionomycin | 0.0 |
| Dendritic cells none | 0.0 |
| Dendritic cells LPS | 0.0 |
| Dendritic cells anti-CD40 | 0.0 |
| Monocytes rest | 0.0 |
| Monocytes LPS | 0.0 |
| Macrophages rest | 0.0 |
| Macrophages LPS | 0.0 |
| HUVEC none | 0.0 |
| HUVEC starved | 1.3 |
| HUVEC IL-1beta | 0.0 |
| HUVEC IFN gamma | 0.0 |
| HUVEC TNF alpha + IFN gamma | 0.0 |
| HUVEC TNF alpha + IL4 | 0.0 |
| HUVEC IL-11 | 0.0 |
| Lung Microvascular EC none | 0.0 |
| Lung Microvascular EC TNFalpha + IL-1beta | 0.0 |
| Microvascular Dermal EC none | 0.0 |
| Microsvasular Dermal EC TNFalpha + IL-1beta | 0.0 |
| Bronchial epithelium TNFalpha + IL1beta | 0.0 |
| Small airway epithelium none | 0.0 |
| Small airway epithelium TNFalpha + IL-1beta | 0.0 |
| Coronery artery SMC rest | 0.0 |
| Coronery artery SMC TNFalpha + IL-1beta | 0.0 |
| Astrocytes rest | 0.9 |
| Astrocytes TNFalpha + IL-1beta | 0.0 |
| KU-812 (Basophil) rest | 0.0 |
| KU-812 (Basophil) PMA/ionomycin | 0.0 |
| CCD1106 (Keratinocytes) none | 0.7 |
| CCD1106 (Keratinocytes) TNFalpha + IL-1beta | 0.0 |
| Liver cirrhosis | 0.0 |
| NCI-H292 none | 0.0 |
| NCI-H292 IL-4 | 0.0 |
| NCI-H292 IL-9 | 0.0 |
| NCI-H292 IL-13 | 0.5 |
| NCI-H292 IFN gamma | 0.0 |
| HPAEC none | 0.0 |
| HPAEC TNF alpha + IL-1 beta | 0.0 |
| Lung fibroblast none | 0.0 |
| Lung fibroblast TNF alpha + IL-1 beta | 0.0 |
| Lung fibroblast IL-4 | 0.0 |
| Lung fibroblast IL-9 | 0.0 |
| Lung fibroblast IL-13 | 0.0 |
| Lung fibroblast IFN gamma | 0.0 |
| Dermal fibroblast CCD1070 rest | 0.0 |
| Dermal fibroblast CCD1070 TNF alpha | 0.0 |
| Dermal fibroblast CCD1070 IL-1 beta | 0.6 |
| Dermal fibroblast IFN gamma | 0.0 |
| Dermal fibroblast IL-4 | 0.6 |
| Dermal Fibroblasts rest | 0.0 |
| Neutrophils TNFa + LPS | 1.1 |
| Neutrophils rest | 0.6 |
| Colon | 0.5 |
| Lung | 2.2 |
| Thymus | 12.2 |
| Kidney | 100.0 |

Column A - Rel. Exp. (%) Ag4346, Run 190944493

[0434] TABLE DK
general oncology screening panel_v_2.4

| Tissue Name | A |
|---|---|
| Colon cancer 1 | 58.6 |
| Colon NAT 1 | 0.0 |
| Colon cancer 2 | 0.0 |
| Colon NAT 2 | 0.0 |
| Colon cancer 3 | 0.0 |
| Colon NAT 3 | 29.1 |
| Colon malignant cancer 4 | 21.8 |
| Colon NAT 4 | 0.0 |
| Lung cancer 1 | 0.0 |
| Lung NAT 1 | 0.0 |
| Lung cancer 2 | 0.0 |
| Lung NAT 2 | 0.0 |
| Squamous cell carcinoma 3 | 0.0 |
| Lung NAT 3 | 0.0 |
| Metastatic melanoma 1 | 79.0 |
| Melanoma 2 | 69.7 |
| Melanoma 3 | 19.5 |
| Metastatic melanoma 4 | 100.0 |
| Metastatic melanoma 5 | 49.3 |
| Bladder cancer 1 | 0.0 |
| Bladder NAT 1 | 0.0 |
| Bladder cancer 2 | 0.0 |
| Bladder NAT 2 | 0.0 |
| Bladder NAT 3 | 0.0 |
| Bladder NAT 4 | 25.0 |
| Prostate adenocarcinoma 1 | 23.2 |
| Prostate adenocarcinoma 2 | 0.0 |
| Prostate adenocarcinoma 3 | 44.8 |
| Prostate adenocarcinoma 4 | 0.0 |
| Prostate NAT 5 | 25.5 |
| Prostate adenocarcinoma 6 | 10.1 |
| Prostate adenocarcinoma 7 | 0.0 |
| Prostate adenocarcinoma 8 | 0.0 |
| Prostate adenocarcinoma 9 | 10.6 |
| Prostate NAT 10 | 0.0 |
| Kidney cancer 1 | 24.7 |
| Kidney NAT 1 | 24.3 |
| Kidney cancer 2 | 75.3 |
| Kidney NAT 2 | 28.1 |
| Kidney cancer 3 | 7.4 |
| Kidney NAT 3 | 23.7 |
| Kidney cancer 4 | 0.0 |
| Kidney NAT 4 | 28.1 |

Column A - Rel. Exp. (%) Ag4347, Run 260280470

[0435] AI_comprehensive panel_v1.0 Summary: Ag4347 Highest expression of this gene was detected in normal lung (CT=30.8). This gene showed a wide spread low expression in this panel. Moderate to low levels of expression of this gene were detected in samples derived from normal and orthoarthitis/rheumatoid arthritis bone, cartilage, and synovium samples, from normal lung, COPD lung, emphysema, atopic asthma, asthma, allergy, Crohn's disease (normal matched control and diseased), ulcerative colitis (normal matched control and diseased), and psoriasis (normal matched control and diseased). Therefore, therapeutic modulation of this gene, encoded protein and/or use of antibodies or small molecule targeting this gene or gene product is useful in the treatment of autoimmune and inflammatory disorders including psoriasis, allergy, asthma, inflammatory bowel disease, rheumatoid arthritis and osteoarthritis

[0436] Cellular OA/RA Summary: Ag4346 Highest expression of this gene was detected in MH7A (synoviocyte) cell line (CT=33.5). Low expression of this gene was also detected in untreated and activated SW1353 (chondrocyte) cell lines, and activated MH7A cells. Therefore, modulation of this gene or encoded protein will be useful in the treatment of orthoarthritis and rheumatoid arthritis.

[0437] General_screening_panel_v1.4 Summary: Ag4347 Highest expression of this gene was detected in ovarian cancer SK-OV-3 cell line (CT=32). Low expression of this gene was detected in number of cancer cell lines derived from ovarian, breast, and colon cancers. Therefore, therapeutic modulaion of this gene, expressed protein and/or use of antibodies or small molecule drug targeting this gene or gene product is useful in the treatment of ovarian, breast and colon cancers.

[0438] Low levels of expression of this gene were seen in all the regions of the central nervous system examined, including amygdala, hippocampus, substantia nigra, thalamus, cerebellum, cerebral cortex, and spinal cord. Expression analysis of this gene using CuraChip 1.2 (see example 2) showed that this gene was down-regulated in the temporal cortex of Alzheimer's patient but was up-regulated in patients who were found to have serious Alzheimer disease-like pathology with no associated dementia relative to the control patients. Therefore, therapeutic modulation of this gene, expressed protein and/or use of antibodies or small molecule drug targeting this gene or gene product is useful in the treatment of central nervous system disorders such as Alzheimer's disease, Parkinson's disease, epilepsy, multiple sclerosis, schizophrenia and depression.

[0439] Mini tissue OA/RA Summary: Ag4346 Highest expression of this gene was detected in brain (CT=29.9). Significant expression of this gene was also seen in normal synovium, kidney, colon, ovary and small intestine. Expression of this gene was slightly downregulated in synovium from OA and RA patients. Therefore, modulation of this gene and/or encoded protein is useful in the treatment of orthoarthritis and rheumatoid arthritis.

[0440] PGI1.0 Summary: Ag4346 Highest expression of this gene was detected in lung fibrosis sample (CT=30.8). Significant levels of expression of this gene was also detected in emphyzema and asthma lung. Therefore, therapeutic modulaion of this gene, encoded protein and/or use of expressed protein, antibodies or small molecule drug targeting this gene or gene product is useful in the treatment of emphyzema, asthma and lung fibrosis.

[0441] Panel 3D Summary: Ag4347 Low expression of this gene was detected mainly in a small cell lung cancer DMS-79 and DMS-114 cell lines (CTs=33-34). Therefore, therapeutic modulation of this gene, encoded protein, and/or use of small molecule drug targeting this gene or gene product is useful in the treatment of small cell lung cancer.

[0442] Panel 4.1D Summary: Ag4346 Moderate levels of expression of this gene was detected mainly in kidney sample (CT=31.8). Therefore, therapeutic modulation of this gene is useful in the treatment of kidney related diseases including lupus erythematosus and glomerulonephritis.

[0443] general oncology screening panel_v_{—}2.4 Summary: Ag4347 Low expression of this gene was detected in a colon cancer, a metastatic melanoma and a kidney cancer samples. Therefore, therapeutic modulation of this gene, encoded protein,and/or use of antibodies or small molecule drug targeting this gene or gene product is useful in the treatment of these cancers.

[0444] E. NOV5a (CG54611-06): WNT-3A Protein Precursor

[0445] Expression of gene CG54611-06 was assessed using the primer-probe sets Ag2445 and Ag7111, described in Tables EA and EB. Results of the RTQ-PCR runs are shown in Tables EC and ED.

TABLE EA

Probe Name Ag2445

| | | | Start | SEQ ID |
|---|---|---|---|---|
| Primers | Sequences | Length | Position | No |
| Forward | 5′-gccccactcggatacttct-3′ | 19 | 22 | 241 |
| Probe | TET-5′-tactcctctgcagcctgaagcaggct-3′- | 26 | 41 | 242 |
| | TAMRA | | | |
| Reverse | 5′-ggaatactgtggcccaaca-3′ | 19 | 99 | 243 |

[0446] TABLE EB

Probe Name Ag7111

| | | | Start | SEQ ID |
|---|---|---|---|---|
| Primers | Sequences | Length | Position | No |
| Forward | 5′-cgtgctggacaaagctacc-3′ | 19 | 318 | 244 |
| Probe | TET-5′-agtcggcctttgtccacgccatt-3′- | 23 | 341 | 245 |
| | TAMRA | | | |
| Reverse | 5′-gtcactgcaaaggccaca-3′ | 18 | 375 | 246 |

[0447] TABLE EC
Ardais Panel 1.1

| Tissue Name | A |
|---|---|
| 136803 Lung cancer(368) | 0.0 |
| 136804 Lung cancer(369) | 5.1 |
| 136805 Lung NAT(36A) | 100.0 |
| 136787 lung cancer(356) | 0.0 |
| 136788 lung NAT(357) | 62.9 |
| 136806 Lung cancer(36B) | 0.6 |
| 136807 Lung NAT(36C) | 73.2 |
| 136810 Lung NAT(36F) | 17.6 |
| 136789 lung cancer(358) | 1.4 |
| 136802 Lung cancer(365) | 0.5 |
| 136811 Lung cancer(370) | 0.5 |
| 136791 Lung cancer(35A) | 4.5 |
| 136794 lung NAT(35D) | 96.6 |
| 136815 Lung cancer(374) | 8.1 |
| 136816 Lung NAT(375) | 31.6 |
| 136813 Lung cancer(372) | 17.6 |
| 136814 Lung NAT(373) | 31.9 |
| 136795 Lung cancer(35E) | 29.9 |
| 136797 Lung cancer(360) | 5.9 |
| 136799 Lung cancer(362) | 30.6 |
| 136800 Lung NAT(363) | 17.7 |

Column A - Rel. Exp. (%) Ag2445, Run 306368467

[0448] TABLE ED
General_screening_panel_v1.7

| Tissue Name | A | B |
|---|---|---|
| Adipose | 1.6 | 0.1 |
| HUVEC | 0.0 | 0.0 |
| Melanoma* Hs688(A).T | 0.0 | 0.0 |
| Melanoma* Hs688(B).T | 56.3 | 54.0 |
| Melanoma (met) SK-MEL-5 | 0.0 | 0.0 |
| Testis | 0.8 | 0.4 |
| Prostate ca. (bone met) PC-3 | 0.0 | 0.0 |
| Prostate ca. DU145 | 1.7 | 1.6 |
| Prostate pool | 4.0 | 6.0 |
| Uterus pool | 0.0 | 0.4 |
| Ovarian ca. OVCAR-3 | 0.0 | 0.0 |
| Ovarian ca. (ascites) SK-OV-3 | 0.0 | 0.0 |
| Ovarian ca. OVCAR-4 | 0.0 | 3.8 |
| Ovarian ca. OVCAR-5 | 0.2 | 1.0 |
| Ovarian ca. IGROV-1 | 0.0 | 18.8 |
| Ovarian ca. OVCAR-8 | 0.0 | 0.0 |
| Ovary | 0.0 | 0.0 |
| Breast ca. MCF-7 | 1.5 | 1.8 |
| Breast ca. MDA-MB-231 | 0.4 | 0.6 |
| Breast ca. BT 549 | 0.0 | 0.0 |
| Breast ca. T47D | 0.0 | 0.0 |
| Breast pool | 0.0 | |
| Trachea | 23.5 | 34.6 |
| Lung | 100.0 | 97.3 |
| Fetal Lung | 1.1 | 1.2 |
| Lung ca. NCI-N417 | 0.0 | 0.5 |
| Lung ca. LX-1 | 0.0 | 0.0 |
| Lung ca. NCI-H146 | 0.0 | 0.0 |
| Lung ca. SHP-77 | 0.0 | 0.0 |
| Lung ca. NCI-H23 | 0.0 | 0.6 |
| Lung ca. NCI-H460 | 0.4 | 0.0 |
| Lung ca. HOP-62 | 0.5 | 0.0 |
| Lung ca. NCI-H522 | 0.2 | 1.3 |
| Lung ca. DMS-114 | 0.4 | 0.4 |
| Liver | 0.0 | 0.0 |
| Fetal Liver | 0.0 | 0.0 |
| Kidney pool | 1.1 | 1.5 |
| Fetal Kidney | 0.9 | 5.7 |
| Renal ca. 786-0 | 13.7 | 27.9 |
| Renal ca. A498 | 0.0 | 0.6 |
| Renal ca. ACHN | 0.0 | 0.0 |
| Renal ca. UO-31 | 0.0 | 0.0 |
| Renal ca. TK-10 | 0.0 | 0.0 |
| Bladder | 0.0 | 0.0 |
| Gastric ca. (liver met.) NCI-N87 | 0.0 | 0.0 |
| Stomach | 0.0 | 0.0 |
| Colon ca. SW-948 | 0.0 | 0.0 |
| Colon ca. SW480 | 0.0 | 0.0 |
| Colon ca. (SW480 met) SW620 | 0.0 | 0.0 |
| Colon ca. HT29 | 0.0 | 0.0 |
| Colon ca. HCT-116 | 75.8 | 100.0 |
| Colon cancer tissue | 0.0 | 0.0 |
| Colon ca. SW1116 | 0.0 | 0.0 |
| Colon ca. Colo-205 | 0.0 | 0.0 |
| Colon ca. SW-48 | 0.0 | 0.0 |
| Colon | 0.0 | 0.0 |
| Small Intestine | 0.0 | 0.0 |
| Fetal Heart | 0.0 | 0.0 |
| Heart | 0.0 | 0.0 |
| Lymph Node pool 2 | 0.7 | 0.2 |
| Fetal Skeletal Muscle | 0.0 | 0.0 |
| Skeletal Muscle pool | 0.0 | 0.0 |
| Skeletal Muscle | 0.0 | 0.0 |
| Spleen | 0.0 | 0.0 |
| Thymus | 0.6 | 0.0 |
| CNS cancer (glio/astro) SF-268 | 0.0 | 0.0 |
| CNS cancer (glio/astro) T98G | 0.0 | 0.0 |
| CNS cancer (neuro; met) SK-N-AS | 0.0 | 0.0 |
| CNS cancer (astro) SF-539 | 0.5 | 0.2 |
| CNS cancer (astro) SNB-75 | 0.0 | 1.9 |
| CNS cancer (glio) SNB-19 | 0.0 | 0.0 |
| CNS cancer (glio) SF-295 | 0.0 | 0.0 |
| Brain (Amygdala) | 0.0 | 0.0 |
| Brain (Cerebellum) | 0.0 | 0.0 |
| Brain (Fetal) | 0.0 | 0.0 |
| Brain (Hippocampus) | 0.0 | 0.0 |
| Cerebral Cortex pool | 0.0 | 0.0 |
| Brain (Substantia nigra) | 0.0 | 0.0 |
| Brain (Thalamus) | 0.0 | 0.0 |
| Brain (Whole) | 0.0 | 0.0 |
| Spinal Cord | 0.0 | 0.0 |
| Adrenal Gland | 0.0 | 0.0 |
| Pituitary Gland | 0.0 | 0.0 |
| Salivary Gland | 6.5 | 4.9 |
| Thyroid | 0.0 | 0.5 |
| Pancreatic ca. PANC-1 | 0.0 | 2.0 |
| Pancreas pool | 0.0 | 0.0 |

Column A - Rel. Exp. (%) Ag2445, Run 405874582
Column B - Rel. Exp. (%) Ag7111, Run 318037265

[0449] Ardais Panel 1.1 Summary: Ag2445 Highest expression of this gene was detected in a matched control sample for lung cancer (CT=28.5). The gene expression was down-regulated in coresponding cancer tissues. This gene encodes wingless-type MMTV integration site family, member 3A (WNT3A). Therapeutic modulation of this gene, expressed protein and/or use of antibodies or small molecule drugs targeting the gene or gene product are useful in the treatment of lung cancer.

[0450] General_screening_panel_v1.7 Summary: Ag2445 and Ag7111 Results from two experiments using the two different probe and primer sets that respond to the AL391534_C gene are in very good agreement. Moderate expression was detected in normal lung (CT=28.7, 29.8) but not in any of the 9 lung cancer lines examined. It is consistant with data from patient tissues, see Ardais Panel 1.1. Thus, therapeutic modulation of this gene, expressed protein and/or use of antibodies or small molecule drugs targeting the gene or gene product is useful in the treatment of lung cancer.

[0451] Moderate expression was also detected in trachea (CT=30.26, 31.89), one (out of 9) colon cancer line (CT=28.9, 30.2) and one (out of 3) Melanoma cell line (CT=29.6, 30.6).

[0452] F. NOV6a (CG92035-02): C1Q-Related Factor Precursor

[0453] Expression of gene CG92035-02 was assessed using the primer-probe sets Ag3767, Ag4935 and Ag4902, described in Tables FA, FB and FC. Results of the RTQ-PCR runs are shown in Tables FD and FE.

TABLE FA

Probe Name Ag3767

| | | | Start | SEQ ID |
|---|---|---|---|---|
| Primers | Sequences | Length | Position | No |
| Forward | 5′-gcggaccagaactacgactac-3′ | 21 | 634 | 247 |
| Probe | TET-5′-agcaacagcgtgatcctgcacct-3′- | 23 | 658 | 248 |
| | TAMRA | | | |
| Reverse | 5′-tccatccagcttgatgaaga-3′ | 20 | 698 | 249 |

[0454] TABLE FB

Probe Name Ag4935

| | | | Start | SEQ ID |
|---|---|---|---|---|
| Primers | Sequences | Length | Position | No |
| Forward | 5′-gcggaccagaactacgactac-3′ | 21 | 634 | 250 |
| Probe | TET-5′-agcaacagcgtgatcctgcacct-3′- | 23 | 658 | 251 |
| | TAMRA | | | |
| Reverse | 5′-tccatccagcttgatgaaga-3′ | 20 | 698 | 252 |

[0455] TABLE FC

Probe Name Ag4902

| | | | Start | SEQ ID |
|---|---|---|---|---|
| Primers | Sequences | Length | Position | No |
| Forward | 5′-gcggaccagaactacgactac-3′ | 21 | 634 | 253 |
| Probe | TET-5′-agcaacagcgtgatcctgcacct-3′- | 23 | 658 | 254 |
| | TAMRA | | | |
| Reverse | 5′-tccatccagcttgatgaaga-3′ | 20 | 698 | 255 |

[0456] TABLE FD
General_screening_panel_v1.4

| Tissue Name | A |
|---|---|
| Adipose | 0.2 |
| Melanoma* Hs688(A).T | 0.1 |
| Melanoma* Hs688(B).T | 0.1 |
| Melanoma* M14 | 0.6 |
| Melanoma* LOXIMVI | 0.0 |
| Melanoma* SK-MEL-5 | 2.0 |
| Squamous cell carcinoma SCC-4 | 0.1 |
| Testis Pool | 0.1 |
| Prostate ca.* (bone met) PC-3 | 1.8 |
| Prostate Pool | 0.3 |
| Placenta | 0.0 |
| Uterus Pool | 0.2 |
| Ovarian ca. OVCAR-3 | 0.2 |
| Ovarian ca. SK-OV-3 | 14.2 |
| Ovarian ca. OVCAR-4 | 0.1 |
| Ovarian ca. OVCAR-5 | 2.2 |
| Ovarian ca. IGROV-1 | 4.0 |
| Ovarian ca. OVCAR-8 | 8.9 |
| Ovary | 0.1 |
| Breast ca. MCF-7 | 1.7 |
| Breast ca. MDA-MB-231 | 0.7 |
| Breast ca. BT 549 | 7.9 |
| Breast ca. T47D | 10.0 |
| Breast ca. MDA-N | 0.1 |
| Breast Pool | 0.1 |
| Trachea | 0.2 |
| Lung | 0.0 |
| Fetal Lung | 0.4 |
| Lung ca. NCI-N417 | 1.1 |
| Lung ca. LX-1 | 0.0 |
| Lung ca. NCI-H146 | 4.9 |
| Lung ca. SHP-77 | 4.2 |
| Lung ca. A549 | 2.1 |
| Lung ca. NCI-H526 | 0.3 |
| Lung ca. NCI-H23 | 1.7 |
| Lung ca. NCI-H460 | 0.2 |
| Lung ca. HOP-62 | 3.1 |
| Lung ca. NCI-H522 | 1.8 |
| Liver | 0.0 |
| Fetal Liver | 0.1 |
| Liver ca. HepG2 | 0.0 |
| Kidney Pool | 1.0 |
| Fetal Kidney | 0.4 |
| Renal ca. 786-0 | 34.6 |
| Renal ca. A498 | 100.0 |
| Renal ca. ACHN | 4.3 |
| Renal ca. UO-31 | 0.2 |
| Renal ca. TK-10 | 0.6 |
| Bladder | 0.3 |
| Gastric ca. (liver met.) NCI-N87 | 0.1 |
| Gastric ca. KATO III | 0.0 |
| Colon ca. SW-948 | 0.0 |
| Colon ca. SW480 | 0.5 |
| Colon ca.* (SW480 met) SW620 | 0.0 |
| Colon ca. HT29 | 0.0 |
| Colon ca. HCT-116 | 0.5 |
| Colon ca. CaCo-2 | 0.6 |
| Colon cancer tissue | 0.0 |
| Colon ca. SW1116 | 1.3 |
| Colon ca. Colo-205 | 0.0 |
| Colon ca. SW-48 | 0.0 |
| Colon Pool | 0.1 |
| Small Intestine Pool | 0.3 |
| Stomach Pool | 0.2 |
| Bone Marrow Pool | 0.2 |
| Fetal Heart | 1.9 |
| Heart Pool | 0.3 |
| Lymph Node Pool | 0.4 |
| Fetal Skeletal Muscle | 0.2 |
| Skeletal Muscle Pool | 0.0 |
| Spleen Pool | 0.0 |
| Thymus Pool | 0.1 |
| CNS cancer (glio/astro) U87-MG | 1.2 |
| CNS cancer (glio/astro) U-118-MG | 3.3 |
| CNS cancer (neuro; met) SK-N-AS | 2.0 |
| CNS cancer (astro) SF-539 | 1.0 |
| CNS cancer (astro) SNB-75 | 11.0 |
| CNS cancer (glio) SNB-19 | 3.3 |
| CNS cancer (glio) SF-295 | 5.0 |
| Brain (Amygdala) Pool | 1.1 |
| Brain (cerebellum) | 1.8 |
| Brain (fetal) | 1.9 |
| Brain (Hippocampus) Pool | 1.8 |
| Cerebral Cortex Pool | 2.0 |
| Brain (Substantia nigra) Pool | 2.4 |
| Brain (Thalamus) Pool | 2.3 |
| Brain (whole) | 2.5 |
| Spinal Cord Pool | 4.0 |
| Adrenal Gland | 0.2 |
| Pituitary gland Pool | 0.0 |
| Salivary Gland | 0.0 |
| Thyroid (female) | 0.1 |
| Pancreatic ca. CAPAN2 | 0.1 |
| Pancreas Pool | 0.3 |

Column A - Rel. Exp. (%) Ag3767, Run 218981839

[0457] TABLE FE
Panel 4.1D

| Tissue Name | A | B |
|---|---|---|
| Secondary Th1 act | 0.0 | 0.5 |
| Secondary Th2 act | 4.0 | 1.4 |
| Secondary Tr1 act | 4.5 | 0.5 |
| Secondary Th1 rest | 0.0 | 0.6 |
| Secondary Th2 rest | 2.9 | 2.5 |
| Secondary Tr1 rest | 2.9 | 0.0 |
| Primary Th1 act | 2.3 | 0.3 |
| Primary Th2 act | 0.0 | 0.3 |
| Primary Tr1 act | 3.5 | 0.6 |
| Primary Th1 rest | 0.7 | 0.6 |
| Primary Th2 rest | 0.0 | 0.3 |
| Primary Tr1 rest | 3.0 | 2.9 |
| CD45RA CD4 lymphocyte act | 9.1 | 3.6 |
| CD45RO CD4 lymphocyte act | 1.2 | 0.0 |
| CD8 lymphocyte act | 0.6 | 0.0 |
| Secondary CD8 lymphocyte rest | 0.6 | 0.3 |
| Secondary CD8 lymphocyte act | 1.5 | 1.5 |
| CD4 lymphocyte none | 0.8 | 0.0 |
| 2ry Th1/Th2/Tr1 anti-CD95 CH11 | 1.7 | 0.0 |
| LAK cells rest | 6.7 | 1.2 |
| LAK cells JL-2 | 2.8 | 1.6 |
| LAK cells IL-2 + IL-12 | 2.4 | 0.0 |
| LAK cells IL-2 + IFN gamma | 3.1 | 0.3 |
| LAK cells IL-2 + IL-18 | 8.7 | 1.3 |
| LAK cells PMA/ionomycin | 3.3 | 2.7 |
| NK Cells IL-2 rest | 25.5 | 12.4 |
| Two Way MLR 3 day | 0.7 | 0.0 |
| Two Way MLR 5 day | 0.8 | 0.7 |
| Two Way MLR 7 day | 0.7 | 0.0 |
| PBMC rest | 0.0 | 0.0 |
| PBMC PWM | 0.0 | 0.0 |
| PBMC PHA-L | 14.9 | 9.2 |
| Ramos (B cell) none | 0.0 | 0.0 |
| Ramos (B cell) ionomycin | 0.0 | 0.0 |
| B lymphocytes PWM | 0.0 | 1.1 |
| B lymphocytes CD40L and IL-4 | 0.0 | 0.4 |
| EOL-1 dbcAMP | 0.0 | 0.0 |
| EOL-1 dbcAMP PMA/ionomycin | 0.0 | 0.0 |
| Dendritic cells none | 0.0 | 0.0 |
| Dendritic cells LPS | 0.0 | 0.4 |
| Dendritic cells anti-CD40 | 0.0 | 0.0 |
| Monocytes rest | 0.0 | 0.0 |
| Monocytes LPS | 0.0 | 0.0 |
| Macrophages rest | 0.0 | 0.0 |
| Macrophages LPS | 0.0 | 0.9 |
| HUVEC none | 1.7 | 0.0 |
| HUVEC starved | 1.8 | 1.8 |
| HUVEC IL-1beta | 3.3 | 2.3 |
| HUVEC IFN gamma | 2.9 | 4.0 |
| HUVEC TNF alpha + IFN gamma | 1.4 | 1.2 |
| HUVEC TNF alpha + IL4 | 0.7 | 1.1 |
| HUVEC IL-11 | 3.2 | 1.8 |
| Lung Microvascular EC none | 5.6 | 2.0 |
| Lung Microvascular EC TNFalpha + IL-1beta | 5.8 | 2.9 |
| Microvascular Dermal EC none | 1.5 | 0.8 |
| Microsvasular Dermal EC TNFalpha + IL-1beta | 0.0 | 1.1 |
| Bronchial epithelium TNFalpha + IL1beta | 1.8 | 1.9 |
| Small airway epithelium none | 0.0 | 0.0 |
| Small airway epithelium TNFalpha + IL-1beta | 1.7 | 0.2 |
| Coronery artery SMC rest | 2.7 | 0.8 |
| Coronery artery SMC TNFalpha + IL-1beta | 0.0 | 0.9 |
| Astrocytes rest | 100.0 | 43.8 |
| Astrocytes TNFalpha + IL-1beta | 53.2 | 15.8 |
| KU-812 (Basophil) rest | 0.0 | 1.4 |
| KU-812 (Basophil) PMA/ionomycin | 0.0 | 1.1 |
| CCD1106 (Keratinocytes) none | 23.5 | 8.5 |
| CCD1106 (Keratinocytes) TNFalpha + IL-1beta | 8.5 | 5.4 |
| Liver cirrhosis | 6.8 | 4.2 |
| NCI-H292 none | 22.2 | 13.7 |
| NCI-H292 IL-4 | 49.7 | 19.8 |
| NCI-H292 IL-9 | 79.0 | 43.5 |
| NCI-H292 IL-13 | 50.0 | 40.6 |
| NCI-H292 IFN gamma | 66.9 | 31.2 |
| HPAEC none | 6.7 | 1.5 |
| HPAEC TNF alpha + IL-1 beta | 5.0 | 1.6 |
| Lung fibroblast none | 62.0 | 36.9 |
| Lung fibroblast TNF alpha + IL-1 beta | 42.3 | 31.4 |
| Lung fibroblast IL-4 | 35.1 | 35.1 |
| Lung fibroblast IL-9 | 59.9 | 26.1 |
| Lung fibroblast IL-13 | 48.0 | 20.0 |
| Lung fibroblast IFN gamma | 88.9 | 44.4 |
| Dermal fibroblast CCD1070 rest | 14.5 | 6.0 |
| Dermal fibroblast CCD1070 TNF alpha | 16.8 | 6.3 |
| Dermal fibroblast CCD1070 IL-1 beta | 10.8 | 6.6 |
| Dermal fibroblast IFN gamma | 21.5 | 8.8 |
| Dermal fibroblast IL-4 | 19.2 | 17.1 |
| Dermal Fibroblasts rest | 13.5 | 7.9 |
| Neutrophils TNFa + LPS | 0.0 | 0.6 |
| Neutrophils rest | 0.0 | 1.5 |
| Colon | 24.8 | 7.5 |
| Lung | 5.4 | 7.4 |
| Thymus | 3.0 | 22.1 |
| Kidney | 44.8 | 100.0 |

Column A - Rel. Exp. (%) Ag3767, Run 170069112
Column B - Rel. Exp. (%) Ag4935, Run 223598631

[0458] General_screening_panel_v1.4 Summary: Ag3767 High expression of this gene was detected in 2 renal cancer A498 and 786-0 cell lines (CTs=26-28). Moderate expression of this gene was also seen in number of cancer cell lines derived from melanoma, brain, breast, ovary, lung and prostate cancers. Therefore, expression of this gene can be used as diagnostic marker to detect the presence of these cancers. Therapeutic modulation of this gene, expressed protein and/or use of antibodies or small molecule drugs targeting the gene or gene product is useful in the treatment of kidney, melanoma, brain, breast, ovary, lung and prostate cancers.

[0459] This gene was expressed at moderate to low levels in all regions of the central nervous system examined, including amygdala, hippocampus, substantia nigra, thalamus, cerebellum, cerebral cortex, and spinal cord. Therapeutic modulation of this gene, expressed protein and/or use of antibodies or small molecule drugs targeting the gene or gene product is useful in the treatment of central nervous system disorders such as Alzheimer's disease, Parkinson's disease, epilepsy, multiple sclerosis, schizophrenia and depression.

[0460] This gene was expressed at much higher level in fetal (CT=32.3) when compared to adult heart(CT=35). This observation indicates that the protein product may enhance heart growth or development in the fetus and thus act in a regenerative capacity in the adult. Therapeutic modulation of this gene, expressed protein and/or use of antibodies or small molecule drugs targeting the gene or gene product is useful in treatment of heart related diseases.

[0461] Panel 4.1D Summary: Ag3767/μg4935 Highest expression of this gene was detected in resting astrocytes and kidney (CTs=30-32). In addition, moderate to low expression of this gene was also seen in keratinocytes, resting and activated mucoepidermoid NCI-H292, resting and activated lung and dermal fibroblasts. Therefore, therapeutic modulation of this gene or its protein product through the use of antibodies or small molecule drug is useful in the threatment of psoriasis, asthma, allergies, chronic obstructive pulmonary disease, emphysema and kidney related diseases including lupus erythematosus.

### Example D

### Expression of CG54455-06 in stable CHO-K1 cells

[0462] A 456 bp long Bg1II-XhoI fragment containing the CG54455-06 (mature form of CG54455-01) sequence was subcloned into BamHI-XhoI digested pEE14.4FL2_MSA to generate plasmid 3337. The resulting plasmid 3337 was transfected into CHO-K1 cells using the LipofectaminePlus reagent following the manufacturer's instructions (Invitrogen/Gibco) and stable clones were selected based on resistance against MSX. The culture media was DMEM, 10% FBS, 1× nonessential amino acids. The expression and secretion levels of the clone were assessed by Western blot analysis using HRP conjugated V5 antibody. The V5 epitope is fused to the gene of interest at the Cter, in the pEE14.4Sec vector. FIG. 1 shows that CG54455 is expressed, and a 94 kDa protein is secreted by the CHO-K1 cells.

### Other Embodiments

[0463] Although particular embodiments have been disclosed herein in detail, this has been done by way of example for purposes of illustration only, and is not intended to be limiting with respect to the scope of the appended claims, which follow. In particular, it is contemplated by the inventors that various substitutions, alterations, and modifications may be made to the invention without departing from the spirit and scope of the invention as defined by the claims. The choice of nucleic acid starting material, clone of interest, or library type is believed to be a matter of routine for a person of ordinary skill in the art with knowledge of the embodiments described herein. Other aspects, advantages, and modifications considered to be within the scope of the following claims. The claims presented are representative of the inventions disclosed herein. Other, unclaimed inventions are also contemplated. Applicants reserve the right to pursue such inventions in later claims.

The application's sequence listing, which the Patent Office published only in electronic form, follows.

SEQUENCE LISTING (255 sequences)

SEQ ID NO: 1 - DNA, 1984 bp, Homo sapiens
  CDS (50)..(1981)
aattccggttgaaaccatccctcagctcctagagggagattgttagatcatgaaactaattaccatccttttcctctgctccaggctactactaagtttaacccaggaatcacagtccgaggaaattgactgcaatgacaaggatttatttaaagctgtggatgctgctctgaagaaatataacagtcaaaaccaaagtaacaaccagtttgtattgtaccgcataactgaagccactaagacggttggctctgacacgttttattccttcaagtacgaaatcaaggagggggattgtcctgttcaaagtggcaaaacctggcaggactgtgagtacaaggatgctgcaaaagcagccactggagaatgcacggcaaccgtggggaagaggagcagtacgaaattctccgtggctacccagacctgccagattactccagccgagggccctgtggtgacagcccagtacgactgcctcggctgtgtgcatcctatatcaacgcagagcccagacctggagcccattctgagacacggcattcagtactttaacaacaacactcaacattcctccctcttcatgcttaatgaagtaaaacgggcccaaagacaggtggtggctggattgaactttcgaattacctactcaattgtgcaaacgaattgttccaaagagaattttctgttcttaactccagactgcaagtccctttggaatggtgataccggtgaatgtacagataatgcatacatcgatattcagctacgaattgcttccttctcacagaactgtgacatttatccagggaaggattttgtacaaccacctaccaagatttgcgtgggctgccccagagatatacccaccaacagcccagagctggaggagacactgactcacaccatcacaaagcttaatgcagagaataacgcaactttctatttcaagattgacaatgtgaaaaaagcaagagtacaggtggtggctggcaagaaatattttattgacttcgtggccagggaaaccacatgttccaaggaaagtaatgaagagttgaccgaaagctgtgagaccaaaaaacttggccaaagcctagattgcaacgctgaagtttatgtggtaccctgggagaaaaaaatttaccctactgtcaactgtcaaccactgggaatgatctcactgatgaaaaggcctccaggtttttcacctttccgatcatcacgaataggggaaataaaagaagaaacaactgtaagtccaccccacacttccatggcacctgcacaagatgaagagcgggattcaggaaaagaacaagggcatactcgtagacatgactggggccatgaaaaacaaagaaaacataatcttggccatggccataaacatgaacgtgaccaagggcatgggcaccaaagaggacatggccttggccatggacacgaacaacagcatggtcttggtcatggacataagttcaaacttgatgatgatcttgaacaccaagggggccatgtccttgaccatggacataagcataagcatggtcatggccacggaaaacataaaaataaaggcaaaaagaatggaaagcacaatggttggaaaacagagcatttggcaagctcttctgaagacagtactacaccttctgcacagacacaagagaagacagaagggccaacacccatcccttccctagccaagccaggtgtaacagttaccttttctgactttcaggactctgatctcattgcaactatgatgcctcctatatcaccagctcccatacagagtgatgacgattggatccctgatatccagatagacccaaatggcctttcatttaacccaatatcagattttccagacacgacctccccaaaatgtcctggacgcccctggaagtcagttagtgaaattaatccaaccacacaaatgaaagaatcttattatttcgatctcactgatggcctttcttaa

SEQ ID NO: 2 - protein, 644 aa, Homo sapiens
MKLITILFLCSRLLLSLTQESQSEEIDCNDKDLFKAVDAALKKYNSQNQSNNQFVLYRITEATKTVGSDTFYSFKYEIKEGDCPVQSGKTWQDCEYKDAAKAATGECTATVGKRSSTKFSVATQTCQITPAEGPVVTAQYDCLGCVHPISTQSPDLEPILRHGIQYFNNNTQHSSLFMLNEVKRAQRQVVAGLNFRITYSIVQTNCSKENFLFLTPDCKSLWNGDTGECTDNAYIDIQLRIASFSQNCDIYPGKDFVQPPTKICVGCPRDIPTNSPELEETLTHTITKLNAENNATFYFKIDNVKKARVQVVAGKKYFIDFVARETTCSKESNEELTESCETKKLGQSLDCNAEVYVVPWEKKIYPTVNCQPLGMISLMKRPPGFSPFRSSRIGEIKEETTVSPPHTSMAPAQDEERDSGKEQGHTRRHDWGHEKQRKHNLGHGHKHERDQGHGHQRGHGLGHGHEQQHGLGHGHKFKLDDDLEHQGGHVLDHGHKHKHGHGHGKHKNKGKKNGKHNGWKTEHLASSSEDSTTPSAQTQEKTEGPTPIPSLAKPGVTVTFSDFQDSDLIATMMPPISPAPIQSDDDWIPDIQIDPNGLSFNPISDFPDTTSPKCPGRPWKSVSEINPTTQMKESYYFDLTDGLS

SEQ ID NO: 3 - DNA, 1981 bp, Homo sapiens
  CDS (50)..(1981)
aattccggttgaaaccatccctcagctcctagagggagattgttagatcatgaaactaattaccatccttttcctctgctccaggctactactaagtttaacccaggaatcacagtccgaggaaattgactgcaatgacaaggatttatttaaagctgtggatgctgctctgaagaaatataacagtcaaaaccaaagtaacaaccagtttgtattgtaccgcataactgaagccactaagacggttggctctgacacgttttattccttcaagtacgaaatcaaggagggggattgtcctgttcaaagtggcaaaacctggcaggactgtgagtacaaggatgctgcaaaagcagccactggagaatgcacggcaaccgtggggaagaggagcagtacgaaattctccgtggctacccagacctgccagattactccagccgagggccctgtggtgacagcccagtacgactgcctcggctgtgtgcatcctatatcaacgcagagcccagacctggagcccattctgagacacggcattcagtactttaacaacaacactcaacattcctccctcttcatgcttaatgaagtaaaacgggcccaaagacaggtggtggctggattgaactttcgaattacctactcaattgtgcaaacgaattgttccaaagagaattttctgttcttaactccagactgcaagtccctttggaatggtgataccggtgaatgtacagataatgcatacatcgatattcagctacgaattgcttccttctcacagaactgtgacatttatccagggaaggattttgtacaaccacctaccaagatttgcgtgggctgccccagagatatacccaccaacagcccagagctggaggagacactgactcacaccatcacaaagcttaatgcagagaataacgcaactttctatttcaagattgacaatgtgaaaaaagcaagagtacaggtggtggctggcaagaaatattttattgacttcgtggccagggaaaccacatgttccaaggaaagtaatgaagagttgaccgaaagctgtgagaccaaaaaacttggccaaagcctagattgcaacgctgaagtttatgtggtaccctgggagaaaaaaatttaccctactgtcaactgtcaaccactgggaatgatctcactgatgaaaaggcctccaggtttttcacctttccgatcatcacgaataggggaaataaaagaagaaacaactgtaagtccaccccacacttccatggcacctgcacaagatgaagagcgggattcaggaaaagaacaagggcatactcgtagacatgactggggccatgaaaaacaaagaaaacataatcttggccatggccataaacatgaacgtgaccaagggcatgggcaccaaagaggacatggccttggccatggacacgaacaacagcatggtcttggtcatggacataagttcaaacttgatgatgatcttgaacaccaagggggccatgtccttgaccatggacataagcataagcatggtcatggccacggaaaacataaaaataaaggcaaaaagaatggaaagcacaatggttggaaaacagagcatttggcaagctcttctgaagacagtactacaccttctgcacagacacaagagaagacagaagggccaacacccatcccttccctagccaagccaggtgtaacagttaccttttctgactttcaggactctgatctcattgcaactatgatgcctcctatatcaccagctcccatacagagtgatgacgattggatccctgatatccagatagacccaaatggcctttcatttaacccaatatcagattttccagacacgacctccccaaaatgtcctggacgcccctggaagtcagttagtgaaattaatccaaccacacaaatgaaagaatcttattatttcgatctcactgatggcctttct

SEQ ID NO: 4 - protein, 644 aa, Homo sapiens; identical to SEQ ID NO: 2

SEQ ID NO: 5 - DNA, 1935 bp, Homo sapiens
  CDS (1)..(1932)
atgaaactaattaccatccttttcctctgctccaggctactactaagtttaacccaggaatcacagtccgaggaaattgactgcaatgacaaggatttatttaaagctgtggatgctgctctgaagaaatataacagtcaaaaccaaagtaacaaccagtttgtattgtaccgcataactgaagccactaagacggttggctctgacacgttttattccttcaagtacgaaatcaaggagggggactgtcctgttcaaagtggcaaaacctggcaggactgtgagtacaaggatgcagcaaaagcagccactggagaatgcacggcaaccgtggggaagaggagcagtacgaaattctccgtggctacccagacctgccagattactccagccgagggccctgtggtgacagcccagtacgactgcctcggctgtgtgcatcctatatcaacgcagagcccagacctggagcccattctgagacacggcattcagtactttaacaacaacactcaacattcctccctcttcacgcttaatgaagtaaaacgggcccaaagacaggtggtggctggattgaactttcgaattacctactcaattgtgcaaacgaattgttccaaagagaattttctgttcttaactccagactgcaagtccctttggaatggtgataccggtgaatgtacagataatgcatacatcgatattcagctacgaattgcttccttctcacagaactgtgacatttatccagggaaggattttgtacaaccacctaccaagatttgcgtgggctgccccagagatatacccaccaacagcccagagctggaggagacactgactcacaccatcacaaagcttaatgcagagaataacgcaactttctatttcaagattgacaatgtgaaaaaagcaagagtacaggtggtggctggcaagaaatattttattgacttcgtggccagggaaaccacatgttccaaggaaagtaatgaagagttgaccgaaagctgtgagaccaaaaaacttggccaaagcctagattgcaacgctgaagtttatgtggtaccctgggagaaaaaaatttaccctactgtcaactgtcaaccactgggaatgatctcactgatgaaaaggcctccaggtttttcacctttccgatcatcacgaataggggaaataaaagaagaaacaactgtaagtccaccccacacttccatggcacctgcacaagatgaagagcgggattcaggaaaagaacaagggcatactcgtagacatgactggggccatgaaaaacaaagaaaacataatcttggccatggccataaacatgaacgtgaccaagggcatgggcaccaaagaggacatggccttggccatggacacgaacaacagcatggtcttggtcatggacataagttcaaacttgatgatgatcttgaacaccaagggggccatgtccttgaccatggacataagcataagcatggtcatggccacggaaaacataaaaataaaggcaaaaagaatggaaagcacaatggttggaaaacagagcatttggcaagctcttctgaagacagtactacaccttctgcacagacacaagagaagacagaagggccaacacccatcccttccctagccaagccaggtgtaacagttaccttttctgactttcaggactctgatctcattgcaactatgatgcctcctatatcaccagctcccatacagagtgatgacgattggatccctgatatccagatagacccaaatggcctttcatttaacccaatatcagattttccagacacgacctccccaaaatgtcctggacgcccctggaagtcagttagtgaaattaatccaaccacacaaatgaaagaatcttattatttcgatctcactgatggcctttcttag

SEQ ID NO: 6 - protein, 644 aa, Homo sapiens [sequence omitted]

SEQ ID NO: 7 - DNA, 327 bp, Homo sapiens
tgcacctgcacaagatgaagagcgggattcaggaaaagaacaagggcatactcgtagacatgactggggccatgaaaaacaaagaaaacataatcttggccatggccataaacatgaacgtgaccaagggcatgggcaccaaagaggacatggccttggccatggacacgaacaacagcatggtcttggtcatggacataagttcaaacttgatgatgatcttgaacaccaagggggccatgtccttgaccatggacataagcataagcatggtcatggccacggaaaacataaaaataaaggcaaaaagaatggaaagcacaatgg

SEQ ID NO: 8 - protein, 109 aa, Homo sapiens
APAQDEERDSGKEQGHTRRHDWGHEKQRKHNLGHGHKHERDQGHGHQRGHGLGHGHEQQHGLGHGHKFKLDDDLEHQGGHVLDHGHKHKHGHGHGKHKNKGKKNGKHNG

SEQ ID NO: 9 - DNA, 1071 bp, Homo sapiens
  CDS (1)..(1071)
atgaaactaattaccatccttttcctctgctccaggctactactaagtttaacccaggaatcacagtccgaggaaattgactgcaatgacaaggatttatttaaagctgtggatgctgctctgaagaaatataacagtcaaaaccaaagtaacaaccagtttgtattgtaccgcataactgaagccactaagacggttggctctgacacgttttattccttcaagtacgaaatcaaggagggggattgtcctgttcaaagtggcaaaacctggcaggactgtgagtacaaggatgctgcaaaagcagccactggagaatgcacggcaaccgtggggaagaggagcagtacgaaattctccgtggctacccagacctgccagattactccagccgagggccctgtggtgacagcccagtacgactgcctcggctgtgtgcatcctatatcaacgcagagcccagacctggagcccattctgagacacggcattcagtactttaacaacaacactcaacattcctccctcttcatgcttaatgaagtaaaacgggcccaaagacaggtggtggctggattgaactttcgaattacctactcaattgtgcaaacgaattgttccaaagagaattttctgttcttaactccagactgcaagtccctttggaatggtgataccggtgaatgtacagataatgcatacatcgatattcagctacgaattgcttccttctcacagaactgtgacatttatccagggaaggattttgtacaaccacctaccaagatttgcgtgggctgccccagggatatacccaccaacagcccagagctggaggagacactgactcacaccatcacaaagcttaatgcagagaataacgcaactttctatttcaagattgacaatgtgaaaaaagcaagagtacaggtggtggctggcaagaaatattttattgacttcgtggccagggaaaccacatgttccaaggaaagtaatgaagagttgaccgaaagctgtgagaccaaaaaacttggccaaagcctagattgcaacgctgaagtttatgtg

SEQ ID NO: 10 - protein, 357 aa, Homo sapiens
MKLITILFLCSRLLLSLTQESQSEEIDCNDKDLFKAVDAALKKYNSQNQSNNQFVLYRITEATKTVGSDTFYSFKYEIKEGDCPVQSGKTWQDCEYKDAAKAATGECTATVGKRSSTKFSVATQTCQITPAEGPVVTAQYDCLGCVHPISTQSPDLEPILRHGIQYFNNNTQHSSLFMLNEVKRAQRQVVAGLNFRITYSIVQTNCSKENFLFLTPDCKSLWNGDTGECTDNAYIDIQLRIASFSQNCDIYPGKDFVQPPTKICVGCPRDIPTNSPELEETLTHTITKLNAENNATFYFKIDNVKKARVQVVAGKKYFIDFVARETTCSKESNEELTESCETKKLGQSLDCNAEVYV

SEQ ID NO: 11 - DNA, 729 bp, Homo sapiens
  CDS (1)..(729)
ggtttttcacctttccgatcatcacgaataggggaaataaaagaagaaacaactgtaagtccaccccacacttccatggcacctgcacaagatgaagagcgggattcaggaaaagaacaagggcatactcgtagacatgactggggccatgaaaaacaaagaaaacataatcttggccatggccataaacatgaacgtgaccaagggcatgggcaccaaagaggacatggccttggccatggacacgaacaacagcatggtcttggtcatggacataagttcaaacttgatgatgatcttgaacaccaagggggccatgtccttgaccatggacataagcataagcatggtcatggccacggaaaacataaaaataaaggcaaaaagaatggaaagcacaatggttggaaaacagagcatttggcaagctcttctgaagacagtactacaccttctgcacagacacaagagaagacagaagggccaacacccatcccttccctagccaagccaggtgtaacagttaccttttctgactttcaggactctgatctcattgcaactatgatgcctcctatatcaccagctcccatacagagtgatgacgattggatccctgatatccagatagacccaaatggcctttcatttaacccaatatcagattttccagacacgacctccccaaaatgtcctggacgcccctggaagtcagttagtgaaattaat

SEQ ID NO: 12 - protein, 243 aa, Homo sapiens
GFSPFRSSRIGEIKEETTVSPPHTSMAPAQDEERDSGKEQGHTRRHDWGHEKQRKHNLGHGHKHERDQGHGHQRGHGLGHGHEQQHGLGHGHKFKLDDDLEHQGGHVLDHGHKHKHGHGHGKHKNKGKKNGKHNGWKTEHLASSSEDSTTPSAQTQEKTEGPTPIPSLAKPGVTVTFSDFQDSDLIATMMPPISPAPIQSDDDWIPDIQIDPNGLSFNPISDFPDTTSPKCPGRPWKSVSEIN

SEQ ID NO: 13 - DNA, 1848 bp, Homo sapiens
  CDS (1)..(1848)
cccaccgactgcaatgacaaggatttatttaaagctgtggatgctgctctgaagaaatataacagtcaaaaccaaagtaacaaccagtttgtattgtaccgcataactgaagccactaagacggttggctctgacacgttttattccttcaagtacgaaatcaaggagggggattgtcctgttcaaagtggcaaaacctggcaggactgtgagtacaaggatgctgcaaaagcagccactggagaatgcacggcaaccgtggggaagaggagcagtacgaaattctccgtggctacccagacctgccagattactccagccgagggccctgtggtgacagcccagtacgactgcctcggctgtgtgcatcctatatcaacgcagagcccagacctggagcccattctgagacacggcattcagtactttaacaacaacactcaacattcctccctcttcatgcttaatgaagtaaaacgggcccaaagacaggtggtggctggattgaactttcgaattacctactcaattgtgcaaacgaattgttccaaagagaattttctgttcttaactccagactgcaagtccctttggaatggtgataccggtgaatgtacagataatgcatacatcgatattcagctacgaattgcttccttctcacagaactgtgacatttatccagggaaggattttgtacaaccacctaccaagatttgcgtgggctgccccagggatatacccaccaacagcccagagctggaggagacactgactcacaccatcacaaagcttaatgcagagaataacgcaactttctatttcaagattgacaatgtgaaaaaagcaagagtacaggtggtggctggcaagaaatattttattgacttcgtggccagggaaaccacatgttccaaggaaagtaatgaagagttgaccgaaagctgtgagaccaaaaaacttggccaaagcctagattgcaacgctgaagtttatgtggtaccctgggagaaaaaaatttaccctactgtcaactgtcaaccactgggaatgatctcactgatgaaaaggcctccaggtttttcacctttccgatcatcacgaataggggaaataaaagaagaaacaactgtaagtccaccccacacttccatggcacctgcacaagatgaagagcgggattcaggaaaagaacaagggcatactcgtagacatgactggggccatgaaaaacaaagaaaacataatcttggccatggccataaacatgaacgtgaccaagggcatgggcaccaaagaggacatggccttggccatggacacgaacaacagcatggtcttggtcatggacataagttcaaacttgatgatgatcttgaacaccaagggggccatgtccttgaccatggacataagcataagcatggtcatggccacggaaaacataaaaataaaggcaaaaagaatggaaagcacaatggttggaaaacagagcatttggcaagctcttctgaagacagtactacaccttctgcacagacacaagagaagacagaagggccaacacccatcccttccctagccaagccaggtgtaacagttaccttttctgactttcaggactctgatctcattgcaactatgatgcctcctatatcaccagctcccatacagagtgatgacgattggatccctgatatccagatagacccaaatggcctttcatttaacccaatatcagattttccagacacgacctccccaaaatgtcctggacgcccctggaagtcagttagtgaaattaatccaaccacacaaatgaaagaatcttattatttcgatctcact

SEQ ID NO: 14 - protein, 616 aa, Homo sapiens
PTDCNDKDLFKAVDAALKKYNSQNQSNNQFVLYRITEATKTVGSDTFYSFKYEIKEGDCPVQSGKTWQDCEYKDAAKAATGECTATVGKRSSTKFSVATQTCQITPAEGPVVTAQYDCLGCVHPISTQSPDLEPILRHGIQYFNNNTQHSSLFMLNEVKRAQRQVVAGLNFRITYSIVQTNCSKENFLFLTPDCKSLWNGDTGECTDNAYIDIQLRIASFSQNCDIYPGKDFVQPPTKICVGCPRDIPTNSPELEETLTHTITKLNAENNATFYFKIDNVKKARVQVVAGKKYFIDFVARETTCSKESNEELTESCETKKLGQSLDCNAEVYVVPWEKKIYPTVNCQPLGMISLMKRPPGFSPFRSSRIGEIKEETTVSPPHTSMAPAQDEERDSGKEQGHTRRHDWGHEKQRKHNLGHGHKHERDQGHGHQRGHGLGHGHEQQHGLGHGHKFKLDDDLEHQGGHVLDHGHKHKHGHGHGKHKNKGKKNGKHNGWKTEHLASSSEDSTTPSAQTQEKTEGPTPIPSLAKPGVTVTFSDFQDSDLIATMMPPISPAPIQSDDDWIPDIQIDPNGLSFNPISDFPDTTSPKCPGRPWKSVSEINPTTQMKESYYFDLT

SEQ ID NO: 15 - DNA, 1863 bp, Homo sapiens
  CDS (1)..(1863)
gaggaaattgactgcaatgacaaggatttatttaaagctgtggatgctgctctgaagaaatataacagtcaaaaccaaagtaacaaccagtttgtattgtaccgcataactgaagccactaagacggttggctctgacacgttttattccttcaagtacgaaatcaaggagggggattgtcctgttcaaagtggcaaaacctggcaggactgtgagtacaaggatgctgcaaaagcagccactggagaatgcacggcaaccgtggggaagaggagcagtacgaaattctccgtggctacccagacctgccagattactccagccgagggccctgtggtgacagcccagtacgactgcctcggctgtgtgcatcctatatcaacgcagagcccagacctggagcccattctgagacacggcattcagtactttaacaacaacactcaacattcctccctcttcatgcttaatgaagtaaaacgggcccaaagacaggtggtggctggattgaactttcgaattacctactcaattgtgcaaacgaattgttccaaagagaattttctgttcttaactccagactgcaagtccctttggaatggtgataccggtgaatgtacagataatgcatacatcgatattcagctacgaattgcttccttctcacagaactgtgacatttatccagggaaggattttgtacaaccacctaccaagatttgcgtgggctgccccagggatatacccaccaacagcccagagctggaggagacactgactcacaccatcacaaagcttaatgcagagaataacgcaactttctatttcaagattgacaatgtgaaaaaagcaagagtacaggtggtggctggcaagaaatattttattgacttcgtggccagggaaaccacatgttccaaggaaagtaatgaagagttgaccgaaagctgtgagaccaaaaaacttggccaaagcctagattgcaacgctgaagtttatgtggtaccctgggagaaaaaaatttaccctactgtcaactgtcaaccactgggaatgatctcactgatgaaaaggcctccaggtttttcacctttccgatcatcacgaataggggaaataaaagaagaaacaactgtaagtccaccccacacttccatggcacctgcacaagatgaagagcgggattcaggaaaagaacaagggcatactcgtagacatgactggggccatgaaaaacaaagaaaacataatcttggccatggccataaacatgaacgtgaccaagggcatgggcaccaaagaggacatggccttggccatggacacgaacaacagcatggtcttggtcatggacataagttcaaacttgatgatgatcttgaacaccaagggggccatgtccttgaccatggacataagcataagcatggtcatggccacggaaaacataaaaataaaggcaaaaagaatggaaagcacaatggttggaaaacagagcatttggcaagctcttctgaagacagtactacaccttctgcacagacacaagagaagacagaagggccaacacccatcccttccctagccaagccaggtgtaacagttaccttttctgactttcaggactctgatctcattgcaactatgatgcctcctatatcaccagctcccatacagagtgatgacgattggatccctgatatccagatagacccaaatggcctttcatttaacccaatatcagattttccagacacgacctccccaaaatgtcctggacgcccctggaagtcagttagtgaaattaatccaaccacacaaatgaaagaatcttattatttcgatctcactgatggcctttct

SEQ ID NO: 16 - protein, 621 aa, Homo sapiens
EEIDCNDKDLFKAVDAALKKYNSQNQSNNQFVLYRITEATKTVGSDTFYSFKYEIKEGDCPVQSGKTWQDCEYKDAAKAATGECTATVGKRSSTKFSVATQTCQITPAEGPVVTAQYDCLGCVHPISTQSPDLEPILRHGIQYFNNNTQHSSLFMLNEVKRAQRQVVAGLNFRITYSIVQTNCSKENFLFLTPDCKSLWNGDTGECTDNAYIDIQLRIASFSQNCDIYPGKDFVQPPTKICVGCPRDIPTNSPELEETLTHTITKLNAENNATFYFKIDNVKKARVQVVAGKKYFIDFVARETTCSKESNEELTESCETKKLGQSLDCNAEVYVVPWEKKIYPTVNCQPLGMISLMKRPPGFSPFRSSRIGEIKEETTVSPPHTSMAPAQDEERDSGKEQGHTRRHDWGHEKQRKHNLGHGHKHERDQGHGHQRGHGLGHGHEQQHGLGHGHKFKLDDDLEHQGGHVLDHGHKHKHGHGHGKHKNKGKKNGKHNGWKTEHLASSSEDSTTPSAQTQEKTEGPTPIPSLAKPGVTVTFSDFQDSDLIATMMPPISPAPIQSDDDWIPDIQIDPNGLSFNPISDFPDTTSPKCPGRPWKSVSEINPTTQMKESYYFDLTDGLS

SEQ ID NO: 17 - DNA, 1866 bp, Homo sapiens
  CDS (1)..(1866)
tctgaggaaattgactgcaatgacaaggatttatttaaagctgtggatgctgctctgaagaaatataacagtcaaaaccaaagtaacaaccagtttgtattgtaccgcataactgaagccactaagacggttggctctgacacgttttattccttcaagtacgaaatcaaggagggggattgtcctgttcaaagtggcaaaacctggcaggactgtgagtacaaggatgctgcaaaagcagccactggagaatgcacggcaaccgtggggaagaggagcagtacgaaattctccgtggctacccagacctgccagattactccagccgagggccctgtggtgacagcccagtacgactgcctcggctgtgtgcatcctatatcaacgcagagcccagacctggagcccattctgagacacggcattcagtactttaacaacaacactcaacattcctccctcttcatgcttaatgaagtaaaacgggcccaaagacaggtggtggctggattgaactttcgaattacctactcaattgtgcaaacgaattgttccaaagagaattttctgttcttaactccagactgcaagtccctttggaatggtgataccggtgaatgtacagataatgcatacatcgatattcagctacgaattgcttccttctcacagaactgtgacatttatccagggaaggattttgtacaaccacctaccaagatttgcgtgggctgccccagggatatacccaccaacagcccagagctggaggagacactgactcacaccatcacaaagcttaatgcagagaataacgcaactttctatttcaagattgacaatgtgaaaaaagcaagagtacaggtggtggctggcaagaaatattttattgacttcgtggccagggaaaccacatgttccaaggaaagtaatgaagagttgaccgaaagctgtgagaccaaaaaacttggccaaagcctagattgcaacgctgaagtttatgtggtaccctgggagaaaaaaatttaccctactgtcaactgtcaaccactgggaatgatctcactgatgaaaaggcctccaggtttttcacctttccgatcatcacgaataggggaaataaaagaagaaacaactgtaagtccaccccacacttccatggcacctgcacaagatgaagagcgggattcaggaaaagaacaagggcatactcgtagacatgactggggccatgaaaaacaaagaaaacataatcttggccatggccataaacatgaacgtgaccaagggcatgggcaccaaagaggacatggccttggccatggacacgaacaacagcatggtcttggtcatggacataagttcaaacttgatgatgatcttgaacaccaagggggccatgtccttgaccatggacataagcataagcatggtcatggccacggaaaacataaaaataaaggcaaaaagaatggaaagcacaatggttggaaaacagagcatttggcaagctcttctgaagacagtactacaccttctgcacagacacaagagaagacagaagggccaacacccatcccttccctagccaagccaggtgtaacagttaccttttctgactttcaggactctgatctcattgcaactatgatgcctcctatatcaccagctcccatacagagtgatgacgattggatccctgatatccagatagacccaaatggcctttcatttaacccaatatcagattttccagacacgacctccccaaaatgtcctggacgcccctggaagtcagttagtgaaattaatccaaccacacaaatgaaagaatcttattatttcgatctcactgatggcctttct

SEQ ID NO: 18 - protein, 622 aa, Homo sapiens
SEEIDCNDKDLFKAVDAALKKYNSQNQSNNQFVLYRITEATKTVGSDTFYSFKYEIKEGDCPVQSGKTWQDCEYKDAAKAATGECTATVGKRSSTKFSVATQTCQITPAEGPVVTAQYDCLGCVHPISTQSPDLEPILRHGIQYFNNNTQHSSLFMLNEVKRAQRQVVAGLNFRITYSIVQTNCSKENFLFLTPDCKSLWNGDTGECTDNAYIDIQLRIASFSQNCDIYPGKDFVQPPTKICVGCPRDIPTNSPELEETLTHTITKLNAENNATFYFKIDNVKKARVQVVAGKKYFIDFVARETTCSKESNEELTESCETKKLGQSLDCNAEVYVVPWEKKIYPTVNCQPLGMISLMKRPPGFSPFRSSRIGEIKEETTVSPPHTSMAPAQDEERDSGKEQGHTRRHDWGHEKQRKHNLGHGHKHERDQGHGHQRGHGLGHGHEQQHGLGHGHKFKLDDDLEHQGGHVLDHGHKHKHGHGHGKHKNKGKKNGKHNGWKTEHLASSSEDSTTPSAQTQEKTEGPTPIPSLAKPGVTVTFSDFQDSDLIATMMPPISPAPIQSDDDWIPDIQIDPNGLSFNPISDFPDTTSPKCPGRPWKSVSEINPTTQMKESYYFDLTDGLS

SEQ ID NO: 19 - DNA, 1357 bp, Homo sapiens
  CDS (1)..(1194)
atgaaactaattaccatccttttcctctgctccaggctactactaagtttaacccaggaatcacagtccgaggaaattgatgactgcaatgacaaggatttatttaaagctgtggatgctgctctgaagaaatataacagtcaaaaccaaagtaacaaccagtttgtattgtaccgcaaaacctggcaggactgtgagtacaaggatgctgcaaaagcagccactggagaatgcacagcaaccgtggggaagaggagcagtacgaaattctccgtggctacccagacctgccagattactccagccgagggccctgtggtgacagcccagtacgactgcctcggctgtgtgcatcctatatcaacgcagagcccagacctggagcccattctgagacacggcattcagtactttaacaacaacactcaacattcctccctcttcacgcttaatgaagtaaaacgggcccaaagacaggtggtggctggattgaactttcgaattacctactcaattgtgcaaacgaattgttccaaagagaattttctgttcttaactccagactgcaagtccctttggaatggtgataccggtgaatgtacagataatgcatacatcgatattcagctacgaattgcttccttctcacagaactgtgacatttatccagggaaggattttgtacaaccacctaccaagatttgcgtgggctgccccagagatatacccaccaacagcccagagctggaggagacactgactcacaccatcacaaagcttaatgcagagaataacgcaactttctatttcaagattgacaatgtgaaaaaagcaagagtacaggtggtggctggcaagaaatattttattgacttcgtggccagggaaaccacatgttccaaggaaagtaatgaagagttgaccgaaagctgtgagaccaaaaaacttggccaaagcctagattgcaacgctgaagtttatgtggtaccctgggagaaaaaaatttaccctactgtcaactgtcaaccactgggaatgatctcactgatgaaaaggcctccaggtttttcacctttccgatcatcacgaataggggaaataaaagaagaaacaactagtcacctaaggtcctgcgagtacaagggtcgacccccaaaggcaggggcagagccagcatctgagagggaggtctcttgaccaatgggcagaatcttcactccaggcacatagccccaaccacctctgccagcaaccttgagaggaaggacaagaagaaagatgggatagaatttaaatagagaagaatgccattttatcactctgcctctgggtgaaataaagatcagtcttgatgttc

SEQ ID NO: 20 - protein, 398 aa, Homo sapiens
MKLITILFLCSRLLLSLTQESQSEEIDDCNDKDLFKAVDAALKKYNSQNQSNNQFVLYRKTWQDCEYKDAAKAATGECTATVGKRSSTKFSVATQTCQITPAEGPVVTAQYDCLGCVHPISTQSPDLEPILRHGIQYFNNNTQHSSLFTLNEVKRAQRQVVAGLNFRITYSIVQTNCSKENFLFLTPDCKSLWNGDTGECTDNAYIDIQLRIASFSQNCDIYPGKDFVQPPTKICVGCPRDIPTNSPELEETLTHTITKLNAENNATFYFKIDNVKKARVQVVAGKKYFIDFVARETTCSKESNEELTESCETKKLGQSLDCNAEVYVVPWEKKIYPTVNCQPLGMISLMKRPPGFSPFRSSRIGEIKEETTSHLRSCEYKGRPPKAGAEPASEREVS

SEQ ID NO: 21 - DNA, 1848 bp, Homo sapiens
  CDS (1)..(1845)
atgaaactaattaccatccttttcctctgctccaggctactactaagtttaacccaggaatcacagtccgaggaaattgatgactgcaatgacaaggatttatttaaagctgtggatgctgctctgaagaaatataacagtcaaaaccaaagtaacaaccagtttgtattgtaccgcaaaacctggcaggactgtgagtacaaggatgctgcaaaagcagccactggagaatgcacagcaaccgtggggaagaggagcagtacgaaattctccgtggctacccagacctgccagattactccagccgagggccctgtggtgacagcccagtacgactgcctcggctgtgtgcatcctatatcaacgcagagcccagacctggagcccattctgagacacggcattcagtactttaacaacaacactcaacattcctccctcttcacgcttaatgaagtaaaacgggcccaaagacaggtggtggctggattgaactttcgaattacctactcaattgtgcaaacgaattgttccaaagagaattttctgttcttaactccagactgcaagtccctttggaatggtgataccggtgaatgtacagataatgcatacatcgatattcagctacgaattgcttccttctcacagaactgtgacatttatccagggaaggattttgtacaaccacctaccaagatttgcgtgggctgccccagagatatacccaccaacagcccagagctggaggagacactgactcacaccatcacaaagcttaatgcagagaataacgcaactttctatttcaagattgacaatgtgaaaaaagcaagagtacaggtggtggctggcaagaaatattttattgacttcgtggccagggaaaccacatgttccaaggaaagtaatgaagagttgaccgaaagctgtgagaccaaaaaacttggccaaagcctagattgcaacgctgaagtttatgtggtaccctgggagaaaaaaatttaccctactgtcaactgtcaaccactgggaatgatctcactgatgaaaaggcctccaggtttttcacctttccgatcatcacgaataggggaaataaaagaagaaacaactgtaagtccaccccacacttccatggcacctgcacaagatgaagagcgggattcaggaaaagaacaagggcatactcgtagacatgactggggccatgaaaaacaaagaaaacataatcttggccatggccataaacatgaacgtgaccaagggcatgggcaccaaagaggacatggccttggccatggacacgaacaacagcatggtcttggtcatggacataagttcaaacttgatgatgatcttgaacaccaagggggccatgtccttgaccatggacataagcataagcatggtcatggccacggaaaacataaaaataaaggcaaaaagaatggaaagcacaatggttggaaaacagagcatttggcaagctcttctgaagacagtactacaccttctgcacagacacaagagaagacagaagggccaacacccatcccttccctagccaagccaggtgtaacagttaccttttctgactttcaggactctgatctcattgcaactatgatgcctcctatatcaccagctcccatacagagtgatgacgattggatccctgatatccagacagacccaaatggcctttcatttaacccaatatcagattttccagacacgacctccccaaaatgtcctggacgcccctggaagtcagttagtgaaattaatccaaccacacaaatgaaagaatcttattatttcgatctcactgatggcctttcttaa

SEQ ID NO: 22 - protein, 615 aa, Homo sapiens
MKLITILFLCSRLLLSLTQESQSEEIDDCNDKDLFKAVDAALKKYNSQNQSNNQFVLYRKTWQDCEYKDAAKAATGECTATVGKRSSTKFSVATQTCQITPAEGPVVTAQYDCLGCVHPISTQSPDLEPILRHGIQYFNNNTQHSSLFTLNEVKRAQRQVVAGLNFRITYSIVQTNCSKENFLFLTPDCKSLWNGDTGECTDNAYIDIQLRIASFSQNCDIYPGKDFVQPPTKICVGCPRDIPTNSPELEETLTHTITKLNAENNATFYFKIDNVKKARVQVVAGKKYFIDFVARETTCSKESNEELTESCETKKLGQSLDCNAEVYVVPWEKKIYPTVNCQPLGMISLMKRPPGFSPFRSSRIGEIKEETTVSPPHTSMAPAQDEERDSGKEQGHTRRHDWGHEKQRKHNLGHGHKHERDQGHGHQRGHGLGHGHEQQHGLGHGHKFKLDDDLEHQGGHVLDHGHKHKHGHGHGKHKNKGKKNGKHNGWKTEHLASSSEDSTTPSAQTQEKTEGPTPIPSLAKPGVTVTFSDFQDSDLIATMMPPISPAPIQSDDDWIPDIQTDPNGLSFNPISDFPDTTSPKCPGRPWKSVSEINPTTQMKESYYFDLTDGLS

SEQ ID NO: 23 - DNA, 1380 bp, Homo sapiens
  CDS (3)..(1283)
tcatgaaactaattaccatccttttcctctgctccaggctgctactaagtttaacccaggaatcacagtccgaggaaattgactgcaatgacaaggatttatttaaagctgtggatgctgctctgaagaaatataacagtcaaaaccaaagtaacaaccagtttgtattgtaccgcataactgaagccactaagacggttggctctgacacgttttattccttcaagtacgaaatcaaggagggggattgtcctgttcaaagtggcaaaacctggcaggactgtgagtacaaggatgctgcaaaagcagccactggagaatgcacggcaaccgtggggaagaggagcagtacgaaattctccgtggctacccagacctgccagattactccagccgagggccctgtggtgacagcccagtacgactgcctcggctgtgtgcatcctatatcaacgcagagcccagacctggagcccattctgagacacggcattcagtactttaacaacaacactcaacattcctccctcttcatgcttaatgaagtaaaacgggcccaaagacaggtggtggctggattgaactttcgaattacctactcaattgtgcaaacgaattgttccaaagagaattttctgttcttaactccagactgcaagtccctttggaatggtgataccggtgaatgtacagataatgcatacatcgatattcagctacgaattgcttccttctcacagaactgtgacatttatccagggaaggattttgtacaaccacctaccaagatttgcgtgggctgccccagagatatacccaccaacagcccagagctggaggagacactgactcacaccatcacaaagcttaatgcagagaataacgcaactttctatttcaagattgacaatgtgaaaaaagcaagagtacaggtggtggctggcaagaaatattttattgacttcgtggccagggaaaccacatgttccaaggaaagtaatgaagagttgaccgaaagctgtgagaccaaaaaacttggccaaagcctagattgcaacgctgaagtttatgtggtaccctgggagaaaaaaatttaccctactgtcaactgtcaaccactgggaatgatctcactgatgaaaaggcctccaggtttttcacctttccgatcatcacgaataggggaaataaaagaagaaacaactagtcacctaaggtcctgcgagtacaagggtcgacccccaaaggcaggggcagagccagcatctgagagggaggtctcttgaccaatgggcagaatcttcactccaggcacatagccccaaccacctctgccagcaaccttgagaggaaggacaagaagaaagatgggatagaatt

SEQ ID NO: 24 - protein, 427 aa, Homo sapiens
MKLITILFLCSRLLLSLTQESQSEEIDCNDKDLFKAVDAALKKYNSQNQSNNQFVLYRITEATKTVGSDTFYSFKYEIKEGDCPVQSGKTWQDCEYKDAAKAATGECTATVGKRSSTKFSVATQTCQITPAEGPVVTAQYDCLGCVHPISTQSPDLEPILRHGIQYFNNNTQHSSLFMLNEVKRAQRQVVAGLNFRITYSIVQTNCSKENFLFLTPDCKSLWNGDTGECTDNAYIDIQLRIASFSQNCDIYPGKDFVQPPTKICVGCPRDIPTNSPELEETLTHTITKLNAENNATFYFKIDNVKKARVQVVAGKKYFIDFVARETTCSKESNEELTESCETKKLGQSLDCNAEVYVVPWEKKIYPTVNCQPLGMISLMKRPPGFSPFRSSRIGEIKEETTSHLRSCEYKGRPPKAGAEPASEREVS

SEQ ID NO: 25 - DNA, 1297 bp, Homo sapiens
  CDS (50)..(1294)
aattccggttgaaaccatccctcagctcctagagggagattgttagatcatgaaactaattaccatccttttcctctgctccaggctactactaagtttaacccaggaatcacagtccgaggaaattgactgcaatgacaaggatttatttaaagctgtggatgctgctctgaagaaatataacagtcaaaaccaaagtaacaaccagtttgtattgtaccgcataactgaagccactaagacggttggctctgacacgttttattccttcaagtacgaaatcaaggagggggattgtcctgttcaaagtggcaaaacctggcaggactgtgagtacaaggatgctgcaaaagcagccactggagaatgcacagcaaccgtggggaagaggagcagtacgaaattctccgtggctacccagacctgccagattactccagccgagggccctgtggtgacagcccagtacgactgcctcggctgtgtgcatcctatatcaacgcagagcccaggtttttcacctttccgatcatcacgaataggggaaataaaagaagaaacaactgtaagtccaccccacacttccatggcacctgcacaagatgaagagcgggattcaggaaaagaacaagggcatactcgtagacatgactggggccatgaaaaacaaagaaaacataatcttggccatggccataaacatgaacgtgaccaagggcatgggcaccaaagaggacatggccttggccatggacacgaacaacagcatggtcttggtcatggacataagttcaaacttgatgatgatcttgaacaccaagggggccatgtccttgaccatggacataagcataagcatggtcatggccacggaaaacataaaaataaaggcaaaaagaatggaaagcacaatggttggaaaacagagcatttggcaagctcttctgaagacagtactacaccttctgcacagacacaagagaagacagaagggccaacacccatcccttccctagccaagccaggtgtaacagttaccttttctgactttcaggactctgatctcattgcaactatgatgcctcctatatcaccagctcccatacagagtgatgacgattggatccctgatatccagatagacccaaatggcctttcatttaacccaatatcagattttccagacacgacctccccaaaatgtcctggacgcccctggaagtcagttagtgaaattaatccaaccacacaaatgaaagaatcttattatttcgatctcactgatggcctttcttaa

SEQ ID NO: 26 - protein, 415 aa, Homo sapiens
MKLITILFLCSRLLLSLTQESQSEEIDCNDKDLFKAVDAALKKYNSQNQSNNQFVLYRITEATKTVGSDTFYSFKYEIKEGDCPVQSGKTWQDCEYKDAAKAATGECTATVGKRSSTKFSVATQTCQITPAEGPVVTAQYDCLGCVHPISTQSPGFSPFRSSRIGEIKEETTVSPPHTSMAPAQDEERDSGKEQGHTRRHDWGHEKQRKHNLGHGHKHERDQGHGHQRGHGLGHGHEQQHGLGHGHKFKLDDDLEHQGGHVLDHGHKHKHGHGHGKHKNKGKKNGKHNGWKTEHLASSSEDSTTPSAQTQEKTEGPTPIPSLAKPGVTVTFSDFQDSDLIATMMPPISPAPIQSDDDWIPDIQIDPNGLSFNPISDFPDTTSPKCPGRPWKSVSEINPTTQMKESYYFDLTDGLS

SEQ ID NO: 27 - DNA, 1892 bp, Homo sapiens
  CDS (50)..(457)
aattccggttgaaaccatccctcagctcctagagggagattgttagatcatgaaactaattaccatccttttcctctgctccaggctactactaagtttaacccaggaatcacagtccgaggaaattgactgcaatgacaaggatttatttaaagctgtggatgctgctctgaagaaatataacagtcaaaaccaaagtaacaaccagtttgtattgtaccgcataactgaagccactaagacggttggctctgacacgttttattccttcaagtacgaaatcaaggagggggattgtcctgttcaaagtggcaaaacctggcaggactgtgagtacaaggatgctgcaaaagcagccactggagaatgcacagcaaccgtgggaagaggagcagtacgaaattctccgtggctacccagacctggagcccattctgagacacggcattcagtactttaacaacaacactcaacattcctccctcttcacgcttaatgaagtaaaacgggcccaaagacaggtggtggctggattgaactttcgaattacctactcaattgtgcaaacgaattgttccaaagagaattttctgttcttaactccagactgcaagtccctttggaatggtgataccggtgaatgtacagataatgcatacatcgatattcagctacgaattgcttccttctcacagaactgtgacatttatccagggaaggattttgtacaaccacctaccaagatttgcgtgggctgccccagagatatacccaccaacagcccagagctggaggagacactgactcacaccatcacaaagcttaatgcagagaataacgcaactttctatttcaagattgacaatgtgaaaaaagcaagagtacaggtggtggctggcaagaaatattttattgacttcgtggccagggaaaccacatgttccaaggaaagtaatgaagagttgaccgaaagctgtgagaccaaaaaacttggccaaagcctagattgcaacgctgaagtttatgtggtaccctgggagaaaaaaatttaccctactgtcaactgtcaaccactgggaatgatctcactgatgaaaaggcctccaggtttttcacctttccgatcatcacgaataggggaaataaaagaagaaacaactgtaagtccaccccacacttccatggcacctgcacaagatgaagagcgggattcaggaaaagaacaagggcatactcgtagacatgactggggccatgaaaaacaaagaaaacataatcttggccatggccataaacatgaacgtgaccaagggcatgggcaccaaagaggacatggccttggccatggacacgaacaacagcatggtcttggtcatggacataagttcaaacttgatgatgatcttgaacaccaagggggccatgtccttgaccatggacataagcataagcatggtcatggccacggaaaacataaaaataaaggcaaaaagaatggaaagcacaatggttggaaaacagagcatttggcaagctcttctgaagacagtactacaccttctgcacagacacaagagaagacagaagggccaacacccatcccttccctagccaagccaggtgtaacagttaccttttctgactttcaggactctgatctcattgcaactatgatgcctcctatatcaccagctcccatacagagtgatgacgattggatccctgatatccagatagacccaaatggcctttcatttaacccaatatcagattttccagacacgacctccccaaaatgtcctggacgcccctggaagtcagttagtgaaattaatccaaccacacaaatgaaagaatcttattatttcgatctcactgatggcctttcttaa

SEQ ID NO: 28 - protein, 136 aa, Homo sapiens
MKLITILFLCSRLLLSLTQESQSEEIDCNDKDLFKAVDAALKKYNSQNQSNNQFVLYRITEATKTVGSDTFYSFKYEIKEGDCPVQSGKTWQDCEYKDAAKAATGECTATVGRGAVRNSPWLPRPGAHSETRHSVL

SEQ ID NO: 29 - DNA, 670 bp, Homo sapiens
  CDS (1)..(507)
atgaaactaattaccatccttttcctctgctccaggctactactaagtttaacccaggaatcacagtccgaggaaattgatgactgcaatgacaaggatttatttaaagctgtggatgctgctctgaagaaatataacagtcaaaaccaaagtaacaaccagtttgtattgtaccgcaaaacctggcaggactgtgagtacaaggatgctgcaaaagcagccactggagaatgcacagcaaccgtggggaagaggagcagtacgaaattctccgtggctacccagacctgccagattactccagccgagggccctgtggtgacagcccagtacgactgcctcggctgtgtgcatcctatatcaacgcagagcccaggtttttcacctttccgatcatcacgaataggggaaataaaagaagaaacaactagtcacctaaggtcctgcgagtacaagggtcgacccccaaaggcaggggcagagccagcatctgagagggaggtctcttgaccaatgggcagaatcttcactccaggcacatagccccaaccacctctgccagcaaccttgagaggaaggacaagaagaaagatgggatagaatttaaatagagaagaatgccattttatcactctgcctctgggtgaaataaagatcagtcttgatgttc

SEQ ID NO: 30 - protein, 169 aa, Homo sapiens
MKLITILFLCSRLLLSLTQESQSEEIDDCNDKDLFKAVDAALKKYNSQNQSNNQFVLYRKTWQDCEYKDAAKAATGECTATVGKRSSTKFSVATQTCQITPAEGPVVTAQYDCLGCVHPISTQSPGFSPFRSSRIGEIKEETTSHLRSCEYKGRPPKAGAEPASEREVS

SEQ ID NO: 31 - DNA, 1193 bp, Homo sapiens
  CDS (1)..(1170)
atgaaactaattaccatccttttcctctgctccaggctactactaagtttaacccaggaatcacagtccgaggaaattgactgcaatgacaaggatttatttaaagctgtggatgctgctctgaagaaatataacagtcaaaaccaaagtaacaaccagtttgtattgtaccgcataactgaagccactaagacggccactggagaatgcacggcaaccgtggggaagaggagcagtacgaaattctccgtggctacccagacctgccagattactccagccgagggccctgtggtgacagcccagtacgactgcctcggctgtgtgcatcctatatcaacgcagagcccagacctggagcccattctgagacacggcattcagtactttaacaacaacactcaacattcctccctcttcacgcttaatgaagtaaaacgggcccaaagacaggtggtggctggattgaactttcgaattacctactcaattgtgcaaacgaattgttccaaagagaattttctgttcttaactccagactgcgagtccctttggaatggtgataccggtgaatgtacagataatgcatacatcgatattcagctacgaattgcttccttctcacagaactgtgacatttatccagggaaggattttgtacaaccacctaccaagatttgcgtgggctgccccagagatatacccaccaacagcccagagctggaggagacactgactcacaccatcacaaagcttaatgcagagaataacgcaactttctatttcaagattgacaatgtgaaaaaagcaagagtacaggtggtggctggcaagaaatattttattgacttcgtggccagggaaaccacatgttccaaggaaagtaatgaagagttgaccgaaagctgtgagaccaaaaaacttggccaaagcctagattgcaacgctgaagtttatgtggtaccctgggagaaaaaaatttaccctactgtcaactgtcaaccactgggaatgatctcactgatgaaaaggcctccaggtttttcacctttccgatcatcacgaataggggaaataaaagaagaaacaactagtcacctaaggtcctgcgagtacaagggtcgacccccaaaggcaggggcagagccagtatctgagagggaggtctcttgaccaatgggcagaatcttcac

SEQ ID NO: 32 - protein, 390 aa, Homo sapiens
MKLITILFLCSRLLLSLTQESQSEEIDCNDKDLFKAVDAALKKYNSQNQSNNQFVLYRITEATKTATGECTATVGKRSSTKFSVATQTCQITPAEGPVVTAQYDCLGCVHPISTQSPDLEPILRHGIQYFNNNTQHSSLFTLNEVKRAQRQVVAGLNFRITYSIVQTNCSKENFLFLTPDCESLWNGDTGECTDNAYIDIQLRIASFSQNCDIYPGKDFVQPPTKICVGCPRDIPTNSPELEETLTHTITKLNAENNATFYFKIDNVKKARVQVVAGKKYFIDFVARETTCSKESNEELTESCETKKLGQSLDCNAEVYVVPWEKKIYPTVNCQPLGMISLMKRPPGFSPFRSSRIGEIKEETTSHLRSCEYKGRPPKAGAEPVSEREVS

SEQ ID NO: 33 - DNA, 48 bp, Homo sapiens
  CDS (1)..(48)
cataaaaataaaggcaaaaagaatggaaagcacaatggttggaaaaca

SEQ ID NO: 34 - protein, 16 aa, Homo sapiens
HKNKGKKNGKHNGWKT

SEQ ID NO: 35 - DNA, 48 bp, Homo sapiens
  CDS (1)..(48)
aagcatggtcatggccacggaaaacataaaaataaaggcaaaaagaat

SEQ ID NO: 36 - protein, 16 aa, Homo sapiens
KHGHGHGKHKNKGKKN

SEQ ID NO: 37 - DNA, 48 bp, Homo sapiens
  CDS (1)..(48)
gtccttgaccatggacataagcataagcatggtcatggccacggaaaa

SEQ ID NO: 38 - protein, 16 aa, Homo sapiens
VLDHGHKHKHGHGHGK

SEQ ID NO: 39 - DNA, 48 bp, Homo sapiens
  CDS (1)..(48)
ggacatggccttggccatggacacgaacaacagcatggtcttggtcat

SEQ ID NO: 40 - protein, 16 aa, Homo sapiens
GHGLGHGHEQQHGLGH

SEQ ID NO: 41 - DNA, 48 bp, Homo sapiens
  CDS (1)..(48)
gaccaagggcatgggcaccaaagaggacatggccttggccatggacac

SEQ ID NO: 42 - protein, 16 aa, Homo sapiens
DQGHGHQRGHGLGHGH

SEQ ID NO: 43 - DNA, 1863 bp, Homo sapiens; identical to SEQ ID NO: 15
  CDS (1)..(1863)

SEQ ID NO: 44 - protein, 621 aa, Homo sapiens; identical to SEQ ID NO: 16

SEQ ID NO: 45 - DNA, 1071 bp, Homo sapiens; identical to SEQ ID NO: 9
  CDS (1)..(1071)

SEQ ID NO: 46 - protein, 357 aa, Homo sapiens; identical to SEQ ID NO: 10

SEQ ID NO: 47 - DNA, 327 bp, Homo sapiens
  CDS (1)..(327)
gcacctgcacaagatgaagagcgggattcaggaaaagaacaagggcatactcgtagacatgactggggccatgaaaaacaaagaaaacataatcttggccatggccataaacatgaacgtgaccaagggcatgggcaccaaagaggacatggccttggccatggacacgaacaacagcatggtcttggtcatggacataagttcaaacttgatgatgatcttgaacaccaagggggccatgtccttgaccatggacataagcataagcatggtcatggccacggaaaacataaaaataaaggcaaaaagaatggaaagcacaatggt

SEQ ID NO: 48 - protein, 109 aa, Homo sapiens; identical to SEQ ID NO: 8

SEQ ID NO: 49 - DNA, 729 bp, Homo sapiens; identical to SEQ ID NO: 11
  CDS (1)..(729)

SEQ ID NO: 50 - protein, 243 aa, Homo sapiens; identical to SEQ ID NO: 12

SEQ ID NO: 51 - DNA, 1935 bp, Homo sapiens; identical to SEQ ID NO: 5
  CDS (1)..(1932)

SEQ ID NO: 52 - protein, 644 aa, Homo sapiens [sequence omitted]

SEQ ID NO: 53 - DNA, 1981 bp, Homo sapiens
  CDS (50)..(1981)
aattccggttgaaaccatccctcagctcctagagggagattgttagatcatgaaactaattaccatccttttcctctgctccaggctactactaagtttaacccgggaatcacagtccgaggaaattgactgcaatgacaaggatttatttaaagctgtggatgctgctctgaagaaatataacagtcaaaaccaaagtaacaaccagtttgtattgtaccgcataactgaagccactaagacggttggctctgacacgttttattccttcaagtacgaaatcaaggagggggattgtcctgttcaaagtggcaaaacctggcaggactgtgagtacaaggatgctgcaaaagcagccactggagaatgcacggcaaccgtggggaagaggagcagtacgaaattctccgtggctacccagacctgccagattactccagccgagggccctgtggtgacagcccagtacgactgcctcggctgtgtgcatcctatatcaacgcagagcccagacctggagcccattctgagacacggcattcagtactttaacaacaacactcaacattcctccctcttcatgcttaatgaagtaaaacgggcccaaagacaggtggtggctggattgaactttcgaattacctactcaattgtgcaaacgaattgttccaaagagaattttctgttcttaactccagactgcaagtccctttggaatggtgataccggtgaatgtacagataatgcatacatcgatattcagctacgaattgcttccttctcacagaactgtgacatttatccagggaaggattttgtacaaccacctaccaagatttgcgtgggctgccccagagatatacccaccaacagcccagagctggaggagacactgactcacaccatcacaaagcttaatgcagagaataacgcaactttctatttcaagattgacaatgtgaaaaaagcaagagtacaggtggtggctggcaagaaatattttattgacttcgtggccagggaaaccacatgttccaaggaaagtaatgaagagttgaccgaaagctgtgagaccaaaaaacttggccaaagcctagattgcaacgctgaagtttatgtggtaccctgggagaaaaaaatttaccctactgtcaactgtcaaccactgggaatgatctcactgatgaaaaggcctccaggtttttcacctttccgatcatcacgaataggggaaataaaagaagaaacaactgtaagtccaccccacacttccatggcacctgcacaagatgaagagcgggattcaggaaaagaacaagggcatactcgtagacatgactggggccatgaaaaacaaagaaaacataatcttggccatggccataaacatgaacgtgaccaagggcatgggcaccaaagaggacatggccttggccatggacacgaacaacagcatggtcttggtcatggacataagttcaaacttgatgatgatcttgaacaccaagggggccatgtccttgaccatggacataagcataagcatggtcatggccacggaaaacataaaaataaaggcaaaaagaatggaaagcacaatggttggaaaacagagcatttggcaagctcttctgaagacagtactacaccttctgcacagacacaagagaagacagaagggccaacacccatcccttccctagccaagccaggtgtaacagttaccttttctgactttcaggactctgatctcattgcaactatgatgcctcctatatcaccagctcccatacagagtgatgacgattggatccctgatatccagatagacccaaatggcctttcatttaacccaatatcagattttccagacacgacctccccaaaatgtcctggacgcccctggaagtcagttagtgaaattaatccaaccacacaaatgaaagaatcttattatttcgatctcactgatggcctttct

SEQ ID NO: 54 - protein, 644 aa, Homo sapiens
MKLITILFLCSRLLLSLTRESQSEEIDCNDKDLFKAVDAALKKYNSQNQSNNQFVLYRITEATKTVGSDTFYSFKYEIKEGDCPVQSGKTWQDCEYKDAAKAATGECTATVGKRSSTKFSVATQTCQITPAEGPVVTAQYDCLGCVHPISTQSPDLEPILRHGIQYFNNNTQHSSLFMLNEVKRAQRQVVAGLNFRITYSIVQTNCSKENFLFLTPDCKSLWNGDTGECTDNAYIDIQLRIASFSQNCDIYPGKDFVQPPTKICVGCPRDIPTNSPELEETLTHTITKLNAENNATFYFKIDNVKKARVQVVAGKKYFIDFVARETTCSKESNEELTESCETKKLGQSLDCNAEVYVVPWEKKIYPTVNCQPLGMISLMKRPPGFSPFRSSRIGEIKEETTVSPPHTSMAPAQDEERDSGKEQGHTRRHDWGHEKQRKHNLGHGHKHERDQGHGHQRGHGLGHGHEQQHGLGHGHKFKLDDDLEHQGGHVLDHGHKHKHGHGHGKHKNKGKKNGKHNGWKTEHLASSSEDSTTPSAQTQEKTEGPTPIPSLAKPGVTVTFSDFQDSDLIATMMPPISPAPIQSDDDWIPDIQIDPNGLSFNPISDFPDTTSPKCPGRPWKSVSEINPTTQMKESYYFDLTDGLS

SEQ ID NO: 55 - DNA, 1981 bp, Homo sapiens
  CDS (50)..(1981)
aattccggttgaaaccatccctcagctcctagagggagattgttagatcatgaaactaattaccatccttttcctctgctccaggctactactaagtttaacccaggaatcacagtccgaggaaattgactgcaatgacaaggatttatttaaagctgtggatgctgctctgaagaaatataacagtcaaaaccaaagtaacaaccagtttgtattgtaccgcataactgaagccactaagacggttggctccgacacgttttattccttcaagtacgaaatcaaggagggggattgtcctgttcaaagtggcaaaacctggcaggactgtgagtacaaggatgctgcaaaagcagccactggagaatgcacggcaaccgtggggaagaggagcagtacgaaattctccgtggctacccagacctgccagattactccagccgagggccctgtggtgacagcccagtacgactgcctcggctgtgtgcatcctatatcaacgcagagcccagacctggagcccattctgagacacggcattcagtactttaacaacaacactcaacattcctccctcttcatgcttaatgaagtaaaacgggcccaaagacaggtggtggctggattgaactttcgaattacctactcaattgtgcaaacgaattgttccaaagagaattttctgttcttaactccagactgcaagtccctttggaatggtgataccggtgaatgtacagataatgcatacatcgatattcagctacgaattgcttccttctcacagaactgtgacatttatccagggaaggattttgtacaaccacctaccaagatttgcgtgggctgccccagagatatacccaccaacagcccagagctggaggagacactgactcacaccatcacaaagcttaatgcagagaataacgcaactttctatttcaagattgacaatgtgaaaaaagcaagagtacaggtggtggctggcaagaaatattttattgacttcgtggccagggaaaccacatgttccaaggaaagtaatgaagagttgaccgaaagctgtgagaccaaaaaacttggccaaagcctagattgcaacgctgaagtttatgtggtaccctgggagaaaaaaatttaccctactgtcaactgtcaaccactgggaatgatctcactgatgaaaaggcctccaggtttttcacctttccgatcatcacgaataggggaaataaaagaagaaacaactgtaagtccaccccacacttccatggcacctgcacaagatgaagagcgggattcaggaaaagaacaagggcatactcgtagacatgactggggccatgaaaaacaaagaaaacataatcttggccatggccataaacatgaacgtgaccaagggcatgggcaccaaagaggacatggccttggccatggacacgaacaacagcatggtcttggtcatggacataagttcaaacttgatgatgatcttgaacaccaagggggccatgtccttgaccatggacataagcataagcatggtcatggccacggaaaacataaaaataaaggcaaaaagaatggaaagcacaatggttggaaaacagagcatttggcaagctcttctgaagacagtactacaccttctgcacagacacaagagaagacagaagggccaacacccatcccttccctagccaagccaggtgtaacagttaccttttctgactttcaggactctgatctcattgcaactatgatgcctcctatatcaccagctcccatacagagtgatgacgattggatccctgatatccagatagacccaaatggcctttcatttaacccaatatcagattttccagacacgacctccccaaaatgtcctggacgcccctggaagtcagttagtgaaattaatccaaccacacaaatgaaagaatcttattatttcgatctcactgatggcctttct

SEQ ID NO: 56 - protein, 644 aa, Homo sapiens; identical to SEQ ID NO: 2

SEQ ID NO: 57 - DNA, 1981 bp, Homo sapiens
  CDS (50)..(1981)
aattccggttgaaaccatccctcagctcctagagggagattgttagatcatgaaactaattaccatccttttcctctgctccaggctactactaagtttaacccaggaatcacagtccgaggaaattgactgcaatgacaaggatttatttaaagctgtggatgctgctctgaagaaatataacagtcaaaaccaaagtaacaaccagtttgtattgtaccgcataactgaagccactaagacggttggctctgacacgttttattccttcaagtacgaaatcaaggagggggactgtcctgttcaaagtggcaaaacctggcaggactgtgagtacaaggatgctgcaaaagcagccactggagaatgcacggcaaccgtggggaagaggagcagtacgaaattctccgtggctacccagacctgccagattactccagccgagggccctgtggtgacagcccagtacgactgcctcggctgtgtgcatcctatatcaacgcagagcccagacctggagcccattctgagacacggcattcagtactttaacaacaacactcaacattcctccctcttcatgcttaatgaagtaaaacgggcccaaagacaggtggtggctggattgaactttcgaattacctactcaattgtgcaaacgaattgttccaaagagaattttctgttcttaactccagactgcaagtccctttggaatggtgataccggtgaatgtacagataatgcatacatcgatattcagctacgaattgcttccttctcacagaactgtgacatttatccagggaaggattttgtacaaccacctaccaagatttgcgtgggctgccccagagatatacccaccaacagcccagagctggaggagacactgactcacaccatcacaaagcttaatgcagagaataacgcaactttctatttcaagattgacaatgtgaaaaaagcaagagtacaggtggtggctggcaagaaatattttattgacttcgtggccagggaaaccacatgttccaaggaaagtaatgaagagttgaccgaaagctgtgagaccaaaaaacttggccaaagcctagattgcaacgctgaagtttatgtggtaccctgggagaaaaaaatttaccctactgtcaactgtcaaccactgggaatgatctcactgatgaaaaggcctccaggtttttcacctttccgatcatcacgaataggggaaataaaagaagaaacaactgtaagtccaccccacacttccatggcacctgcacaagatgaagagcgggattcaggaaaagaacaagggcatactcgtagacatgactggggccatgaaaaacaaagaaaacataatcttggccatggccataaacatgaacgtgaccaagggcatgggcaccaaagaggacatggccttggccatggacacgaacaacagcatggtcttggtcatggacataagttcaaacttgatgatgatcttgaacaccaagggggccatgtccttgaccatggacataagcataagcatggtcatggccacggaaaacataaaaataaaggcaaaaagaatggaaagcacaatggttggaaaacagagcatttggcaagctcttctgaagacagtactacaccttctgcacagacacaagagaagacagaagggccaacacccatcccttccctagccaagccaggtgtaacagttaccttttctgactttcaggactctgatctcattgcaactatgatgcctcctatatcaccagctcccatacagagtgatgacgattggatccctgatatccagatagacccaaatggcctttcatttaacccaatatcagattttccagacacgacctccccaaaatgtcctggacgcccctggaagtcagttagtgaaattaatccaaccacacaaatgaaagaatcttattatttcgatctcactgatggcctttct

SEQ ID NO: 58 - protein, 644 aa, Homo sapiens; identical to SEQ ID NO: 2

SEQ ID NO: 59 - DNA, 1981 bp, Homo sapiens
  CDS (50)..(1981)
aattccggttgaaaccatccctcagctcctagagggagattgttagatcatgaaactaattaccatccttttcctctgctccaggctactactaagtttaacccaggaatcacagtccgaggaaattgactgcaatgacaaggatttatttaaagctgtggatgctgctctgaagaaatataacagtcaaaaccaaagtaacaaccagtttgtattgtaccgcataactgaagccactaagacggttggctctgacacgttttattccttcaagtacgaaatcaaggagggggattgtcctgttcaaagtggcaaaacctggcaggactgtgagtacaaggatgctgcaaaagcaaccactggagaatgcacggcaaccgtggggaagaggagcagtacgaaattctccgtggctacccagacctgccagattactccagccgagggccctgtggtgacagcccagtacgactgcctcggctgtgtgcatcctatatcaacgcagagcccagacctggagcccattctgagacacggcattcagtactttaacaacaacactcaacattcctccctcttcatgcttaatgaagtaaaacgggcccaaagacaggtggtggctggattgaactttcgaattacctactcaattgtgcaaacgaattgttccaaagagaattttctgttcttaactccagactgcaagtccctttggaatggtgataccggtgaatgtacagataatgcatacatcgatattcagctacgaattgcttccttctcacagaactgtgacatttatccagggaaggattttgtacaaccacctaccaagatttgcgtgggctgccccagagatatacccaccaacagcccagagctggaggagacactgactcacaccatcacaaagcttaatgcagagaataacgcaactttctatttcaagattgacaatgtgaaaaaagcaagagtacaggtggtggctggcaagaaatattttattgacttcgtggccagggaaaccacatgttccaaggaaagtaatgaagagttgaccgaaagctgtgagaccaaaaaacttggccaaagcctagattgcaacgctgaagtttatgtggtaccctgggagaaaaaaatttaccctactgtcaactgtcaaccactgggaatgatctcactgatgaaaaggcctccaggtttttcacctttccgatcatcacgaataggggaaataaaagaagaaacaactgtaagtccaccccacacttccatggcacctgcacaagatgaagagcgggattcaggaaaagaacaagggcatactcgtagacatgactggggccatgaaaaacaaagaaaacataatcttggccatggccataaacatgaacgtgaccaagggcatgggcaccaaagaggacatggccttggccatggacacgaacaacagcatggtcttggtcatggacataagttcaaacttgatgatgatcttgaacaccaagggggccatgtccttgaccatggacataagcataagcatggtcatggccacggaaaacataaaaataaaggcaaaaagaatggaaagcacaatggttggaaaacagagcatttggcaagctcttctgaagacagtactacaccttctgcacagacacaagagaagacagaagggccaacacccatcccttccctagccaagccaggtgtaacagttaccttttctgactttcaggactctgatctcattgcaactatgatgcctcctatatcaccagctcccatacagagtgatgacgattggatccctgatatccagatagacccaaatggcctttcatttaacccaatatcagattttccagacacgacctccccaaaatgtcctggacgcccctggaagtcagttagtgaaattaatccaaccacacaaatgaaagaatcttattatttcgatctcactgatggcctttct

SEQ ID NO: 60 - protein, 644 aa, Homo sapiens
MKLITILFLCSRLLLSLTQESQSEEIDCNDKDLFKAVDAALKKYNSQNQSNNQFVLYRITEATKTVGSDTFYSFKYEIKEGDCPVQSGKTWQDCEYKDAAKATTGECTATVGKRSSTKFSVATQTCQITPAEGPVVTAQYDCLGCVHPISTQSPDLEPILRHGIQYFNNNTQHSSLFMLNEVKRAQRQVVAGLNFRITYSIVQTNCSKENFLFLTPDCKSLWNGDTGECTDNAYIDIQLRIASFSQNCDIYPGKDFVQPPTKICVGCPRDIPTNSPELEETLTHTITKLNAENNATFYFKIDNVKKARVQVVAGKKYFIDFVARETTCSKESNEELTESCETKKLGQSLDCNAEVYVVPWEKKIYPTVNCQPLGMISLMKRPPGFSPFRSSRIGEIKEETTVSPPHTSMAPAQDEERDSGKEQGHTRRHDWGHEKQRKHNLGHGHKHERDQGHGHQRGHGLGHGHEQQHGLGHGHKFKLDDDLEHQGGHVLDHGHKHKHGHGHGKHKNKGKKNGKHNGWKTEHLASSSEDSTTPSAQTQEKTEGPTPIPSLAKPGVTVTFSDFQDSDLIATMMPPISPAPIQSDDDWIPDIQIDPNGLSFNPISDFPDTTSPKCPGRPWKSVSEINPTTQMKESYYFDLTDGLS

SEQ ID NO: 61 - DNA, 1981 bp, Homo sapiens
  CDS (50)..(1981)
aattccggttgaaaccatccctcagctcctagagggagattgttagatcatgaaactaattaccatccttttcctctgctccaggctactactaagtttaacccaggaatcacagtccgaggaaattgactgcaatgacaaggatttatttaaagctgtggatgctgctctgaagaaatataacagtcaaaaccaaagtaacaaccagtttgtattgtaccgcataactgaagccactaagacggttggctctgacacgttttattccttcaagtacgaaatcaaggagggggattgtcctgttcaaagtggcaaaacctggcaggactgtgagtacaaggatgctgcaaaagcagccactggagaatgcacggcaaccgtggggaagaggggcagtacgaaattctccgtggctacccagacctgccagattactccagccgagggccctgtggtgacagcccagtacgactgcctcggctgtgtgcatcctatatcaacgcagagcccagacctggagcccattctgagacacggcattcagtactttaacaacaacactcaacattcctccctcttcatgcttaatgaagtaaaacgggcccaaagacaggtggtggctggattgaactttcgaattacctactcaattgtgcaaacgaattgttccaaagagaattttctgttcttaactccagactgcaagtccctttggaatggtgataccggtgaatgtacagataatgcatacatcgatattcagctacgaattgcttccttctcacagaactgtgacatttatccagggaaggattttgtacaaccacctaccaagatttgcgtgggctgccccagagatatacccaccaacagcccagagctggaggagacactgactcacaccatcacaaagcttaatgcagagaataacgcaactttctatttcaagattgacaatgtgaaaaaagcaagagtacaggtggtggctggcaagaaatattttattgacttcgtggccagggaaaccacatgttccaaggaaagtaatgaagagttgaccgaaagctgtgagaccaaaaaacttggccaaagcctagattgcaacgctgaagtttatgtggtaccctgggagaaaaaaatttaccctactgtcaactgtcaaccactgggaatgatctcactgatgaaaaggcctccaggtttttcacctttccgatcatcacgaataggggaaataaaagaagaaacaactgtaagtccaccccacacttccatggcacctgcacaagatgaagagcgggattcaggaaaagaacaagggcatactcgtagacatgactggggccatgaaaaacaaagaaaacataatcttggccatggccataaacatgaacgtgaccaagggcatgggcaccaaagaggacatggccttggccatggacacgaacaacagcatggtcttggtcatggacataagttcaaacttgatgatgatcttgaacaccaagggggccatgtccttgaccatggacataagcataagcatggtcatggccacggaaaacataaaaataaaggcaaaaagaatggaaagcacaatggttggaaaacagagcatttggcaagctcttctgaagacagtactacaccttctgcacagacacaagagaagacagaagggccaacacccatcccttccctagccaagccaggtgtaacagttaccttttctgactttcaggactctgatctcattgcaactatgatgcctcctatatcaccagctcccatacagagtgatgacgattggatccctgatatccagatagacccaaatggcctttcatttaacccaatatcagattttccagacacgacctccccaaaatgtcctggacgcccctggaagtcagttagtgaaattaatccaaccacacaaatgaaagaatcttattatttcgatctcactgatggcctttct

SEQ ID NO: 62 - protein, 644 aa, Homo sapiens
MKLITILFLCSRLLLSLTQESQSEEIDCNDKDLFKAVDAALKKYNSQNQSNNQFVLYRITEATKTVGSDTFYSFKYEIKEGDCPVQSGKTWQDCEYKDAAKAATGECTATVGKRGSTKFSVATQTCQITPAEGPVVTAQYDCLGCVHPISTQSPDLEPILRHGIQYFNNNTQHSSLFMLNEVKRAQRQVVAGLNFRITYSIVQTNCSKENFLFLTPDCKSLWNGDTGECTDNAYIDIQLRIASFSQNCDIYPGKDFVQPPTKICVGCPRDIPTNSPELEETLTHTITKLNAENNATFYFKIDNVKKARVQVVAGKKYFIDFVARETTCSKESNEELTESCETKKLGQSLDCNAEVYVVPWEKKIYPTVNCQPLGMISLMKRPPGFSPFRSSRIGEIKEETTVSPPHTSMAPAQDEERDSGKEQGHTRRHDWGHEKQRKHNLGHGHKHERDQGHGHQRGHGLGHGHEQQHGLGHGHKFKLDDDLEHQGGHVLDHGHKHKHGHGHGKHKNKGKKNGKHNGWKTEHLASSSEDSTTPSAQTQEKTEGPTPIPSLAKPGVTVTFSDFQDSDLIATMMPPISPAPIQSDDDWIPDIQIDPNGLSFNPISDFPDTTSPKCPGRPWKSVSEINPTTQMKESYYFDLTDGLS

SEQ ID NO: 63 - DNA, 1981 bp, Homo sapiens
  CDS (50)..(1981)
aattccggttgaaaccatccctcagctcctagagggagattgttagatcatgaaactaattaccatccttttcctctgctccaggctactactaagtttaacccaggaatcacagtccgaggaaattgactgcaatgacaaggatttatttaaagctgtggatgctgctctgaagaaatataacagtcaaaaccaaagtaacaaccagtttgtattgtaccgcataactgaagccactaagacggttggctctgacacgttttattccttcaagtacgaaatcaaggagggggattgtcctgttcaaagtggcaaaacctggcaggactgtgagtacaaggatgctgcaaaagcagccactggagaatgcacggcaaccgtggggaagaggagcagtacgaaattctccgtggctacccagacctgccagattactccagccgagggccctgtggcgacagcccagtacgactgcctcggctgtgtgcatcctatatcaacgcagagcccagacctggagcccattctgagacacggcattcagtactttaacaacaacactcaacattcctccctcttcatgcttaatgaagtaaaacgggcccaaagacaggtggtggctggattgaactttcgaattacctactcaattgtgcaaacgaattgttccaaagagaattttctgttcttaactccagactgcaagtccctttggaatggtgataccggtgaatgtacagataatgcatacatcgatattcagctacgaattgcttccttctcacagaactgtgacatttatccagggaaggattttgtacaaccacctaccaagatttgcgtgggctgccccagagatatacccaccaacagcccagagctggaggagacactgactcacaccatcacaaagcttaatgcagagaataacgcaactttctatttcaagattgacaatgtgaaaaaagcaagagtacaggtggtggctggcaagaaatattttattgacttcgtggccagggaaaccacatgttccaaggaaagtaatgaagagttgaccgaaagctgtgagaccaaaaaacttggccaaagcctagattgcaacgctgaagtttatgtggtaccctgggagaaaaaaatttaccctactgtcaactgtcaaccactgggaatgatctcactgatgaaaaggcctccaggtttttcacctttccgatcatcacgaataggggaaataaaagaagaaacaactgtaagtccaccccacacttccatggcacctgcacaagatgaagagcgggattcaggaaaagaacaagggcatactcgtagacatgactggggccatgaaaaacaaagaaaacataatcttggccatggccataaacatgaacgtgaccaagggcatgggcaccaaagaggacatggccttggccatggacacgaacaacagcatggtcttggtcatggacataagttcaaacttgatgatgatcttgaacaccaagggggccatgtccttgaccatggacataagcataagcatggtcatggccacggaaaacataaaaataaaggcaaaaagaatggaaagcacaatggttggaaaacagagcatttggcaagctcttctgaagacagtactacaccttctgcacagacacaagagaagacagaagggccaacacccatcccttccctagccaagccaggtgtaacagttaccttttctgactttcaggactctgatctcattgcaactatgatgcctcctatatcaccagctcccatacagagtgatgacgattggatccctgatatccagatagacccaaatggcctttcatttaacccaatatcagattttccagacacgacctccccaaaatgtcctggacgcccctggaagtcagttagtgaaattaatccaaccacacaaatgaaagaatcttattatttcgatctcactgatggcctttct

SEQ ID NO: 64 - protein, 644 aa, Homo sapiens
MKLITILFLCSRLLLSLTQESQSEEIDCNDKDLFKAVDAALKKYNSQNQSNNQFVLYRITEATKTVGSDTFYSFKYEIKEGDCPVQSGKTWQDCEYKDAAKAATGECTATVGKRSSTKFSVATQTCQITPAEGPVATAQYDCLGCVHPISTQSPDLEPILRHGIQYFNNNTQHSSLFMLNEVKRAQRQVVAGLNFRITYSIVQTNCSKENFLFLTPDCKSLWNGDTGECTDNAYIDIQLRIASFSQNCDIYPGKDFVQPPTKICVGCPRDIPTNSPELEETLTHTITKLNAENNATFYFKIDNVKKARVQVVAGKKYFIDFVARETTCSKESNEELTESCETKKLGQSLDCNAEVYVVPWEKKIYPTVNCQPLGMISLMKRPPGFSPFRSSRIGEIKEETTVSPPHTSMAPAQDEERDSGKEQGHTRRHDWGHEKQRKHNLGHGHKHERDQGHGHQRGHGLGHGHEQQHGLGHGHKFKLDDDLEHQGGHVLDHGHKHKHGHGHGKHKNKGKKNGKHNGWKTEHLASSSEDSTTPSAQTQEKTEGPTPIPSLAKPGVTVTFSDFQDSDLIATMMPPISPAPIQSDDDWIPDIQIDPNGLSFNPISDFPDTTSPKCPGRPWKSVSEINPTTQMKESYYFDLTDGLS

SEQ ID NO: 65 - DNA, 1981 bp, Homo sapiens
  CDS (50)..(1981)
aattccggttgaaaccatccctcagctcctagagggagattgttagatcatgaaactaattaccatccttttcctctgctccaggctactactaagtttaacccaggaatcacagtccgaggaaattgactgcaatgacaaggatttatttaaagctgtggatgctgctctgaagaaatataacagtcaaaaccaaagtaacaaccagtttgtattgtaccgcataactgaagccactaagacggttggctctgacacgttttattccttcaagtacgaaatcaaggagggggattgtcctgttcaaagtggcaaaacctggcaggactgtgagtacaaggatgctgcaaaagcagccactggagaatgcacggcaaccgtggggaagaggagcagtacgaaattctccgtggctacccagacctgccagattactccagccgagggccctgtggtgacagcccagtacgactgcctcggctgtgtgcatcctatatcaacgcagagcccagacctggagcccattctgagacacggcattcagtactttaacaacaacactcaacattcctccctcttcatgcttaatgaagtaaaacgggcccaaagacaggtggtggctggattgaactttcgaattacctactcaattgtgcaaacgaattgttccaaagagaattttctgttcttaactccagactgcaagtccctttggaatggtgataccggtgaatgtacagataatgcatacatcgatattcagctacgaattgcttccttctcacagaactgtgacatttatccagggaaggattttgtacaaccacctaccaagatttgcgtgggctgccccagagatatacccaccaacagcccagagctggaggagacactgactcacaccatcacaaagcttaatgcagagaataacgcaactttctatttcaagattgacaatgtgaaaaaagcaagagtacgggtggtggctggcaagaaatattttattgacttcgtggccagggaaaccacatgttccaaggaaagtaatgaagagttgaccgaaagctgtgagaccaaaaaacttggccaaagcctagattgcaacgctgaagtttatgtggtaccctgggagaaaaaaatttaccctactgtcaactgtcaaccactgggaatgatctcactgatgaaaaggcctccaggtttttcacctttccgatcatcacgaataggggaaataaaagaagaaacaactgtaagtccaccccacacttccatggcacctgcacaagatgaagagcgggattcaggaaaagaacaagggcatactcgtagacatgactggggccatgaaaaacaaagaaaacataatcttggccatggccataaacatgaacgtgaccaagggcatgggcaccaaagaggacatggccttggccatggacacgaacaacagcatggtcttggtcatggacataagttcaaacttgatgatgatcttgaacaccaagggggccatgtccttgaccatggacataagcataagcatggtcatggccacggaaaacataaaaataaaggcaaaaagaatggaaagcacaatggttggaaaacagagcatttggcaagctcttctgaagacagtactacaccttctgcacagacacaagagaagacagaagggccaacacccatcccttccctagccaagccaggtgtaacagttaccttttctgactttcaggactctgatctcattgcaactatgatgcctcctatatcaccagctcccatacagagtgatgacgattggatccctgatatccagatagacccaaatggcctttcatttaacccaatatcagattttccagacacgacctccccaaaatgtcctggacgcccctggaagtcagttagtgaaattaatccaaccacacaaatgaaagaatcttattatttcgatctcactgatggcctttct

SEQ ID NO: 66 - protein, 644 aa, Homo sapiens
MKLITILFLCSRLLLSLTQESQSEEIDCNDKDLFKAVDAALKKYNSQNQSNNQFVLYRITEATKTVGSDTFYSFKYEIKEGDCPVQSGKTWQDCEYKDAAKAATGECTATVGKRSSTKFSVATQTCQITPAEGPVVTAQYDCLGCVHPISTQSPDLEPILRHGIQYFNNNTQHSSLFMLNEVKRAQRQVVAGLNFRITYSIVQTNCSKENFLFLTPDCKSLWNGDTGECTDNAYIDIQLRIASFSQNCDIYPGKDFVQPPTKICVGCPRDIPTNSPELEETLTHTITKLNAENNATFYFKIDNVKKARVRVVAGKKYFIDFVARETTCSKESNEELTESCETKKLGQSLDCNAEVYVVPWEKKIYPTVNCQPLGMISLMKRPPGFSPFRSSRIGEIKEETTVSPPHTSMAPAQDEERDSGKEQGHTRRHDWGHEKQRKHNLGHGHKHERDQGHGHQRGHGLGHGHEQQHGLGHGHKFKLDDDLEHQGGHVLDHGHKHKHGHGHGKHKNKGKKNGKHNGWKTEHLASSSEDSTTPSAQTQEKTEGPTPIPSLAKPGVTVTFSDFQDSDLIATMMPPISPAPIQSDDDWIPDIQIDPNGLSFNPISDFPDTTSPKCPGRPWKSVSEINPTTQMKESYYFDLTDGLS

SEQ ID NO: 67 - DNA, 1981 bp, Homo sapiens
  CDS (50)..(1981)
aattccggttgaaaccatccctcagctcctagagggagattgttagatcatgaaactaattaccatccttttcctctgctccaggctactactaagtttaacccaggaatcacagtccgaggaaattgactgcaatgacaaggatttatttaaagctgtggatgctgctctgaagaaatataacagtcaaaaccaaagtaacaaccagtttgtattgtaccgcataactgaagccactaagacggttggctctgacacgttttattccttcaagtacgaaatcaaggagggggattgtcctgttcaaagtggcaaaacctggcaggactgtgagtacaaggatgctgcaaaagcagccactggagaatgcacggcaaccgtggggaagaggagcagtacgaaattctccgtggctacccagacctgccagattactccagccgagggccctgtggtgacagcccagtacgactgcctcggctgtgtgcatcctatatcaacgcagagcccagacctggagcccattctgagacacggcattcagtactttaacaacaacactcaacattcctccctcttcatgcttaatgaagtaaaacgggcccaaagacaggtggtggctggattgaactttcgaattacctactcaattgtgcaaacgaattgttccaaagagaattttctgttcttaactccagactgcaagtccctttggaatggtgataccggtgaatgtacagataatgcatacatcgatattcagctacgaattgcttccttctcacagaactgtgacatttatccagggaaggattttgtacaaccacctaccaagatttgcgtgggctgccccagagatatacccaccaacagcccagagctggaggagacactgactcacaccatcacaaagcttaatgcagagaataacgcaactttctatttcaagattgacaatgtgaaaaaagcaagagtacaggtggtggctggcaagaaatattttattggcttcgtggccagggaaaccacatgttccaaggaaagtaatgaagagttgaccgaaagctgtgagaccaaaaaacttggccaaagcctagattgcaacgctgaagtttatgtggtaccctgggagaaaaaaatttaccctactgtcaactgtcaaccactgggaatgatctcactgatgaaaaggcctccaggtttttcacctttccgatcatcacgaataggggaaataaaagaagaaacaactgtaagtccaccccacacttccatggcacctgcacaagatgaagagcgggattcaggaaaagaacaagggcatactcgtagacatgactggggccatgaaaaacaaagaaaacataatcttggccatggccataaacatgaacgtgaccaagggcatgggcaccaaagaggacatggccttggccatggacacgaacaacagcatggtcttggtcatggacataagttcaaacttgatgatgatcttgaacaccaagggggccatgtccttgaccatggacataagcataagcatggtcatggccacggaaaacataaaaataaaggcaaaaagaatggaaagcacaatggttggaaaacagagcatttggcaagctcttctgaagacagtactacaccttctgcacagacacaagagaagacagaagggccaacacccatcccttccctagccaagccaggtgtaacagttaccttttctgactttcaggactctgatctcattgcaactatgatgcctcctatatcaccagctcccatacagagtgatgacgattggatccctgatatccagatagacccaaatggcctttcatttaacccaatatcagattttccagacacgacctccccaaaatgtcctggacgcccctggaagtcagttagtgaaattaatccaaccacacaaatgaaagaatcttattatttcgatctcactgatggcctttct

SEQ ID NO: 68 - protein, 644 aa, Homo sapiens
MKLITILFLCSRLLLSLTQESQSEEIDCNDKDLFKAVDAALKKYNSQNQSNNQFVLYRITEATKTVGSDTFYSFKYEIKEGDCPVQSGKTWQDCEYKDAAKAATGECTATVGKRSSTKFSVATQTCQITPAEGPVVTAQYDCLGCVHPISTQSPDLEPILRHGIQYFNNNTQHSSLFMLNEVKRAQRQVVAGLNFRITYSIVQTNCSKENFLFLTPDCKSLWNGDTGECTDNAYIDIQLRIASFSQNCDIYPGKDFVQPPTKICVGCPRDIPTNSPELEETLTHTITKLNAENNATFYFKIDNVKKARVQVVAGKKYFIGFVARETTCSKESNEELTESCETKKLGQSLDCNAEVYVVPWEKKIYPTVNCQPLGMISLMKRPPGFSPFRSSRIGEIKEETTVSPPHTSMAPAQDEERDSGKEQGHTRRHDWGHEKQRKHNLGHGHKHERDQGHGHQRGHGLGHGHEQQHGLGHGHKFKLDDDLEHQGGHVLDHGHKHKHGHGHGKHKNKGKKNGKHNGWKTEHLASSSEDSTTPSAQTQEKTEGPTPIPSLAKPGVTVTFSDFQDSDLIATMMPPISPAPIQSDDDWIPDIQIDPNGLSFNPISDFPDTTSPKCPGRPWKSVSEINPTTQMKESYYFDLTDGLS

SEQ ID NO: 69 - DNA, 1981 bp, Homo sapiens
  CDS (50)..(1981)
aattccggttgaaaccatccctcagctcctagagggagattgttagatcatgaaactaattaccatccttttcctctgctccaggctactactaagtttaacccaggaatcacagtccgaggaaattgactgcaatgacaaggatttatttaaagctgtggatgctgctctgaagaaatataacagtcaaaaccaaagtaacaaccagtttgtattgtaccgcataactgaagccactaagacggttggctctgacacgttttattccttcaagtacgaaatcaaggagggggattgtcctgttcaaagtggcaaaacctggcaggactgtgagtacaaggatgctgcaaaagcagccactggagaatgcacggcaaccgtggggaagaggagcagtacgaaattctccgtggctacccagacctgccagattactccagccgagggccctgtggtgacagcccagtacgactgcctcggctgtgtgcatcctatatcaacgcagagcccagacctggagcccattctgagacacggcattcagtactttaacaacaacactcaacattcctccctcttcatgcttaatgaagtaaaacgggcccaaagacaggtggtggctggattgaactttcgaattacctactcaattgtgcaaacgaattgttccaaagagaattttctgttcttaactccagactgcaagtccctttggaatggtgataccggtgaatgtacagataatgcatacatcgatattcagctacgaattgcttccttctcacagaactgtgacatttatccagggaaggattttgtacaaccacctaccaagatttgcgtgggctgccccagagatatacccaccaacagcccagagctggaggagacactgactcacaccatcacaaagcttaatgcagagaataacgcaactttctatttcaagattgacaatgtgaaaaaagcaagagtacaggtggtggctggcaagaaatattttattgacttcgtggccaggggaaccacatgttccaaggaaagtaatgaagagttgaccgaaagctgtgagaccaaaaaacttggccaaagcctagattgcaacgctgaagtttatgtggtaccctgggagaaaaaaatttaccctactgtcaactgtcaaccactgggaatgatctcactgatgaaaaggcctccaggtttttcacctttccgatcatcacgaataggggaaataaaagaagaaacaactgtaagtccaccccacacttccatggcacctgcacaagatgaagagcgggattcaggaaaagaacaagggcatactcgtagacatgactggggccatgaaaaacaaagaaaacataatcttggccatggccataaacatgaacgtgaccaagggcatgggcaccaaagaggacatggccttggccatggacacgaacaacagcatggtcttggtcatggacataagttcaaacttgatgatgatcttgaacaccaagggggccatgtccttgaccatggacataagcataagcatggtcatggccacggaaaacataaaaataaaggcaaaaagaatggaaagcacaatggttggaaaacagagcatttggcaagctcttctgaagacagtactacaccttctgcacagacacaagagaagacagaagggccaacacccatcccttccctagccaagccaggtgtaacagttaccttttctgactttcaggactctgatctcattgcaactatgatgcctcctatatcaccagctcccatacagagtgatgacgattggatccctgatatccagatagacccaaatggcctttcatttaacccaatatcagattttccagacacgacctccccaaaatgtcctggacgcccctggaagtcagttagtgaaattaatccaaccacacaaatgaaagaatcttattatttcgatctcactgatggcctttct

SEQ ID NO: 70 - protein, 644 aa, Homo sapiens
MKLITILFLCSRLLLSLTQESQSEEIDCNDKDLFKAVDAALKKYNSQNQSNNQFVLYRITEATKTVGSDTFYSFKYEIKEGDCPVQSGKTWQDCEYKDAAKAATGECTATVGKRSSTKFSVATQTCQITPAEGPVVTAQYDCLGCVHPISTQSPDLEPILRHGIQYFNNNTQHSSLFMLNEVKRAQRQVVAGLNFRITYSIVQTNCSKENFLFLTPDCKSLWNGDTGECTDNAYIDIQLRIASFSQNCDIYPGKDFVQPPTKICVGCPRDIPTNSPELEETLTHTITKLNAENNATFYFKIDNVKKARVQVVAGKKYFIDFVARGTTCSKESNEELTESCETKKLGQSLDCNAEVYVVPWEKKIYPTVNCQPLGMISLMKRPPGFSPFRSSRIGEIKEETTVSPPHTSMAPAQDEERDSGKEQGHTRRHDWGHEKQRKHNLGHGHKHERDQGHGHQRGHGLGHGHEQQHGLGHGHKFKLDDDLEHQGGHVLDHGHKHKHGHGHGKHKNKGKKNGKHNGWKTEHLASSSEDSTTPSAQTQEKTEGPTPIPSLAKPGVTVTFSDFQDSDLIATMMPPISPAPIQSDDDWIPDIQIDPNGLSFNPISDFPDTTSPKCPGRPWKSVSEINPTTQMKESYYFDLTDGLS

SEQ ID NO: 71 - DNA, 1981 bp, Homo sapiens
  CDS (50)..(1981)
aattccggttgaaaccatccctcagctcctagagggagattgttagatcatgaaactaattaccatccttttcctctgctccaggctactactaagtttaacccaggaatcacagtccgaggaaattgactgcaatgacaaggatttatttaaagctgtggatgctgctctgaagaaatataacagtcaaaaccaaagtaacaaccagtttgtattgtaccgcataactgaagccactaagacggttggctctgacacgttttattccttcaagtacgaaatcaaggagggggattgtcctgttcaaagtggcaaaacctggcaggactgtgagtacaaggatgctgcaaaagcagccactggagaatgcacggcaaccgtggggaagaggagcagtacgaaattctccgtggctacccagacctgccagattactccagccgagggccctgtggtgacagcccagtacgactgcctcggctgtgtgcatcctatatcaacgcagagcccagacctggagcccattctgagacacggcattcagtactttaacaacaacactcaacattcctccctcttcatgcttaatgaagtaaaacgggcccaaagacaggtggtggctggattgaactttcgaattacctactcaattgtgcaaacgaattgttccaaagagaattttctgttcttaactccagactgcaagtccctttggaatggtgataccggtgaatgtacagataatgcatacatcgatattcagctacgaattgcttccttctcacagaactgtgacatttatccagggaaggattttgtacaaccacctaccaagatttgcgtgggctgccccagagatatacccaccaacagcccagagctggaggagacactgactcacaccatcacaaagcttaatgcagagaataacgcaactttctatttcaagattgacaatgtgaaaaaagcaagagtacaggtggtggctggcaagaaatattttattgacttcgtggccagggaaaccacatgttccaagggaagtaatgaagagttgaccgaaagctgtgagaccaaaaaacttggccaaagcctagattgcaacgctgaagtttatgtggtaccctgggagaaaaaaatttaccctactgtcaactgtcaaccactgggaatgatctcactgatgaaaaggcctccaggtttttcacctttccgatcatcacgaataggggaaataaaagaagaaacaactgtaagtccaccccacacttccatggcacctgcacaagatgaagagcgggattcaggaaaagaacaagggcatactcgtagacatgactggggccatgaaaaacaaagaaaacataatcttggccatggccataaacatgaacgtgaccaagggcatgggcaccaaagaggacatggccttggccatggacacgaacaacagcatggtcttggtcatggacataagttcaaacttgatgatgatcttgaacaccaagggggccatgtccttgaccatggacataagcataagcatggtcatggccacggaaaacataaaaataaaggcaaaaagaatggaaagcacaatggttggaaaacagagcatttggcaagctcttctgaagacagtactacaccttctgcacagacacaagagaagacagaagggccaacacccatcccttccctagccaagccaggtgtaacagttaccttttctgactttcaggactctgatctcattgcaactatgatgcctcctatatcaccagctcccatacagagtgatgacgattggatccctgatatccagatagacccaaatggcctttcatttaacccaatatcagattttccagacacgacctccccaaaatgtcctggacgcccctggaagtcagttagtgaaattaatccaaccacacaaatgaaagaatcttattatttcgatctcactgatggcctttct

SEQ ID NO: 72 - protein, 644 aa, Homo sapiens
MKLITILFLCSRLLLSLTQESQSEEIDCNDKDLFKAVDAALKKYNSQNQSNNQFVLYRITEATKTVGSDTFYSFKYEIKEGDCPVQSGKTWQDCEYKDAAKAATGECTATVGKRSSTKFSVATQTCQITPAEGPVVTAQYDCLGCVHPISTQSPDLEPILRHGIQYFNNNTQHSSLFMLNEVKRAQRQVVAGLNFRITYSIVQTNCSKENFLFLTPDCKSLWNGDTGECTDNAYIDIQLRIASFSQNCDIYPGKDFVQPPTKICVGCPRDIPTNSPELEETLTHTITKLNAENNATFYFKIDNVKKARVQVVAGKKYFIDFVARETTCSKGSNEELTESCETKKLGQSLDCNAEVYVVPWEKKIYPTVNCQPLGMISLMKRPPGFSPFRSSRIGEIKEETTVSPPHTSMAPAQDEERDSGKEQGHTRRHDWGHEKQRKHNLGHGHKHERDQGHGHQRGHGLGHGHEQQHGLGHGHKFKLDDDLEHQGGHVLDHGHKHKHGHGHGKHKNKGKKNGKHNGWKTEHLASSSEDSTTPSAQTQEKTEGPTPIPSLAKPGVTVTFSDFQDSDLIATMMPPISPAPIQSDDDWIPDIQIDPNGLSFNPISDFPDTTSPKCPGRPWKSVSEINPTTQMKESYYFDLTDGLS

SEQ ID NO: 73 - DNA, 1981 bp, Homo sapiens
  CDS (50)..(1981)
aattccggttgaaaccatccctcagctcctagagggagattgttagatcatgaaactaattaccatccttttcctctgctccaggctactactaagtttaacccaggaatcacagtccgaggaaattgactgcaatgacaaggatttatttaaagctgtggatgctgctctgaagaaatataacagtcaaaaccaaagtaacaaccagtttgtattgtaccgcataactgaagccactaagacggttggctctgacacgttttattccttcaagtacgaaatcaaggagggggattgtcctgttcaaagtggcaaaacctggcaggactgtgagtacaaggatgctgcaaaagcagccactggagaatgcacggcaaccgtggggaagaggagcagtacgaaattctccgtggctacccagacctgccagattactccagccgagggccctgtggtgacagcccagtacgactgcctcggctgtgtgcatcctatatcaacgcagagcccagacctggagcccattctgagacacggcattcagtactttaacaacaacactcaacattcctccctcttcatgcttaatgaagtaaaacgggcccaaagacaggtggtggctggattgaactttcgaattacctactcaattgtgcaaacgaattgttccaaagagaattttctgttcttaactccagactgcaagtccctttggaatggtgataccggtgaatgtacagataatgcatacatcgatattcagctacgaattgcttccttctcacagaactgtgacatttatccagggaaggattttgtacaaccacctaccaagatttgcgtgggctgccccagagatatacccaccaacagcccagagctggaggagacactgactcacaccatcacaaagcttaatgcagagaataacgcaactttctatttcaagattgacaatgtgaaaaaagcaagagtacaggtggtggctggcaagaaatattttattgacttcgtggccagggaaaccacatgttccaaggaaagtaatgaagagttgaccgaaagctgtgagaccaaaaaacttggccaaagcctagattgcaacgctgaagtttatgtggtaccctgggagaaaaaaatttaccctactgtcaaccgtcaaccactgggaatgatctcactgatgaaaaggcctccaggtttttcacctttccgatcatcacgaataggggaaataaaagaagaaacaactgtaagtccaccccacacttccatggcacctgcacaagatgaagagcgggattcaggaaaagaacaagggcatactcgtagacatgactggggccatgaaaaacaaagaaaacataatcttggccatggccataaacatgaacgtgaccaagggcatgggcaccaaagaggacatggccttggccatggacacgaacaacagcatggtcttggtcatggacataagttcaaacttgatgatgatcttgaacaccaagggggccatgtccttgaccatggacataagcataagcatggtcatggccacggaaaacataaaaataaaggcaaaaagaatggaaagcacaatggttggaaaacagagcatttggcaagctcttctgaagacagtactacaccttctgcacagacacaagagaagacagaagggccaacacccatcccttccctagccaagccaggtgtaacagttaccttttctgactttcaggactctgatctcattgcaactatgatgcctcctatatcaccagctcccatacagagtgatgacgattggatccctgatatccagatagacccaaatggcctttcatttaacccaatatcagattttccagacacgacctccccaaaatgtcctggacgcccctggaagtcagttagtgaaattaatccaaccacacaaatgaaagaatcttattatttcgatctcactgatggcctttct

SEQ ID NO: 74 - protein, 644 aa, Homo sapiens
MKLITILFLCSRLLLSLTQESQSEEIDCNDKDLFKAVDAALKKYNSQNQSNNQFVLYRITEATKTVGSDTFYSFKYEIKEGDCPVQSGKTWQDCEYKDAAKAATGECTATVGKRSSTKFSVATQTCQITPAEGPVVTAQYDCLGCVHPISTQSPDLEPILRHGIQYFNNNTQHSSLFMLNEVKRAQRQVVAGLNFRITYSIVQTNCSKENFLFLTPDCKSLWNGDTGECTDNAYIDIQLRIASFSQNCDIYPGKDFVQPPTKICVGCPRDIPTNSPELEETLTHTITKLNAENNATFYFKIDNVKKARVQVVAGKKYFIDFVARETTCSKESNEELTESCETKKLGQSLDCNAEVYVVPWEKKIYPTVNRQPLGMISLMKRPPGFSPFRSSRIGEIKEETTVSPPHTSMAPAQDEERDSGKEQGHTRRHDWGHEKQRKHNLGHGHKHERDQGHGHQRGHGLGHGHEQQHGLGHGHKFKLDDDLEHQGGHVLDHGHKHKHGHGHGKHKNKGKKNGKHNGWKTEHLASSSEDSTTPSAQTQEKTEGPTPIPSLAKPGVTVTFSDFQDSDLIATMMPPISPAPIQSDDDWIPDIQIDPNGLSFNPISDFPDTTSPKCPGRPWKSVSEINPTTQMKESYYFDLTDGLS

SEQ ID NO: 75 - DNA, 1981 bp, Homo sapiens
  CDS (50)..(1981)
aattccggttgaaaccatccctcagctcctagagggagattgttagatcatgaaactaattaccatccttttcctctgctccaggctactactaagtttaacccaggaatcacagtccgaggaaattgactgcaatgacaaggatttatttaaagctgtggatgctgctctgaagaaatataacagtcaaaaccaaagtaacaaccagtttgtattgtaccgcataactgaagccactaagacggttggctctgacacgttttattccttcaagtacgaaatcaaggagggggattgtcctgttcaaagtggcaaaacctggcaggactgtgagtacaaggatgctgcaaaagcagccactggagaatgcacggcaaccgtggggaagaggagcagtacgaaattctccgtggctacccagacctgccagattactccagccgagggccctgtggtgacagcccagtacgactgcctcggctgtgtgcatcctatatcaacgcagagcccagacctggagcccattctgagacacggcattcagtactttaacaacaacactcaacattcctccctcttcatgcttaatgaagtaaaacgggcccaaagacaggtggtggctggattgaactttcgaattacctactcaattgtgcaaacgaattgttccaaagagaattttctgttcttaactccagactgcaagtccctttggaatggtgataccggtgaatgtacagataatgcatacatcgatattcagctacgaattgcttccttctcacagaactgtgacatttatccagggaaggattttgtacaaccacctaccaagatttgcgtgggctgccccagagatatacccaccaacagcccagagctggaggagacactgactcacaccatcacaaagcttaatgcagagaataacgcaactttctatttcaagattgacaatgtgaaaaaagcaagagtacaggtggtggctggcaagaaatattttattgacttcgtggccagggaaaccacatgttccaaggaaagtaatgaagagttgaccgaaagctgtgagaccaaaaaacttggccaaagcctagattgcaacgctgaagtttatgtggtaccctgggagaaaaaaatttaccctactgtcaactgtcaaccactgggaatgatctcactgatgaaaaggcctccaggtttttcacctttccgatcatcacgaataggggaaataaaagaagaaacaactgtaagtccaccccacacttccatggcacctgcacaagatgaagagcgggattcaggaaaagaacaagggcatactcgtagacatgactggggccatgaaaaacaaagaaaacataatcttggccatggccataaacatgaacgtgaccaagggcatgggcaccaaagaggacatggccttggccatggacacgaacaacagcatggtcttggtcatggacataagttcaaacttgatgatgatcttgaacaccaagggggccatgtccttgaccatggacataagcataagcatggtcatggccacggaaaacataaaaataaaggcaaaaagaatggaaagcacaatggttggaaaacagagcatttggcaagctcttctgaagacagtactacaccttctgcacagacacaagagaagacagaagggccaacacccatcccttccctagccaagccaggtgtaacagttaccttttctgactttcaggactctgatctcattgcaactatgatgcctcctatatcaccagctcccacacagagtgatgacgattggatccctgatatccagatagacccaaatggcctttcatttaacccaatatcagattttccagacacgacctccccaaaatgtcctggacgcccctggaagtcagttagtgaaattaatccaaccacacaaatgaaagaatcttattatttcgatctcactgatggcctttct

SEQ ID NO: 76 - protein, 644 aa, Homo sapiens
MKLITILFLCSRLLLSLTQESQSEEIDCNDKDLFKAVDAALKKYNSQNQSNNQFVLYRITEATKTVGSDTFYSFKYEIKEGDCPVQSGKTWQDCEYKDAAKAATGECTATVGKRSSTKFSVATQTCQITPAEGPVVTAQYDCLGCVHPISTQSPDLEPILRHGIQYFNNNTQHSSLFMLNEVKRAQRQVVAGLNFRITYSIVQTNCSKENFLFLTPDCKSLWNGDTGECTDNAYIDIQLRIASFSQNCDIYPGKDFVQPPTKICVGCPRDIPTNSPELEETLTHTITKLNAENNATFYFKIDNVKKARVQVVAGKKYFIDFVARETTCSKESNEELTESCETKKLGQSLDCNAEVYVVPWEKKIYPTVNCQPLGMISLMKRPPGFSPFRSSRIGEIKEETTVSPPHTSMAPAQDEERDSGKEQGHTRRHDWGHEKQRKHNLGHGHKHERDQGHGHQRGHGLGHGHEQQHGLGHGHKFKLDDDLEHQGGHVLDHGHKHKHGHGHGKHKNKGKKNGKHNGWKTEHLASSSEDSTTPSAQTQEKTEGPTPIPSLAKPGVTVTFSDFQDSDLIATMMPPISPAPTQSDDDWIPDIQIDPNGLSFNPISDFPDTTSPKCPGRPWKSVSEINPTTQMKESYYFDLTDGLS

SEQ ID NO: 77 - DNA, 689 bp, Homo sapiens
  CDS (2)..(658)
ctccttccaggacctggacctctgccctctggatggcggcatccagctacgaatctccgaccaccactacagcaagggcttcaggcaggccgcgtcagttgttgtggccatggacaagctgaggaagatgctggttccctgcccacagaccttccaggagaatgacctgagcaccttctttcccttcatctttgaagaagaacctatcttcttcgacacatgggataacgaggcttatgtgcacgatgcacctgtacgatcactgaactgcacgctccgggactcacagcaaaaaagcttggtgatgtctggtccatatgaactgaaagctctccacctccaaggagaagaaagtaatgacaaaatacctgtggccttgggcctcaaggaaaagaatctgtacctgtcctgcgtgttgaaagatgataagcccactctacagctggagagtgtagatcccaaaaattacccaaagaagaagatggaaaagcgatttgtcttcaacaagatagaaatcaataacaagctggaatttgagtctgcccagttccccaactggtacatcagcacctctcaagcagaaaacatgcccgtcttcctgggagggaccaaaggcggccaggatataactgacttcaccatgcaatttgtgtcttcctaaagagagctgtacccagagagtcctgtgc

SEQ ID NO: 78 - protein, 219 aa, Homo sapiens
SFQDLDLCPLDGGIQLRISDHHYSKGFRQAASVVVAMDKLRKMLVPCPQTFQENDLSTFFPFIFEEEPIFFDTWDNEAYVHDAPVRSLNCTLRDSQQKSLVMSGPYELKALHLQGEESNDKIPVALGLKEKNLYLSCVLKDDKPTLQLESVDPKNYPKKKMEKRFVFNKIEINNKLEFESAQFPNWYISTSQAENMPVFLGGTKGGQDITDFTMQFVSS

SEQ ID NO: 79 - DNA, 400 bp, Homo sapiens
  CDS (2)..(400)
caccggatccctccgggactcacagcaaaaaagcttggtgatgtctggtccatatgaactgaaagctctccacctccaaggagaagaaagtaatgacaaaatacctgtggccttgggcctcaaggaaaagaatctgtacctgtcctgcgtgttgaaagatgataagcccactctacagctggagagtgtagatcccaaaaattacccaaagaagaagatggaaaagcgatttgtcttcaacaagatagaaatcaataacaagctggaatttgagtctgcccagttccccaactggtacatcagcacctctcaagcagaaaacatgcccgtcttcctgggagggaccaaaggcggccaggatataactgacttcaccatgcaatttgtgtctctcgagggc

SEQ ID NO: 80 - protein, 133 aa, Homo sapiens
TGSLRDSQQKSLVMSGPYELKALHLQGEESNDKIPVALGLKEKNLYLSCVLKDDKPTLQLESVDPKNYPKKKMEKRFVFNKIEINNKLEFESAQFPNWYISTSQAENMPVFLGGTKGGQDITDFTMQFVSLEG

SEQ ID NO: 81 - DNA, 820 bp, Homo sapiens
  CDS (3)..(809)
ccatggcagaagtacctgagctcgccagtgaaatgatggcttattacagtggcaatgaggatgacttgttctttgaagctgatggccctaaacagatgaagtgctccttccaggacctggacctctgccctctggatggcggcatccagctacgaatctccgaccaccactacagcaagggcttcaggcaggccgcgtcagttgttgtggccatggacaagctgaggaagatgctggttccctgcccacagaccttccaggagaatgacctgagcaccttctttcccttcatctttgaagaagaacctatcttcttcgacacatgggataacgaggcttatgtgcacgatgcacctgtacgatcactgaactgcacgctccgggactcacagcaaaaaagcttggtgatgtctggtccatatgaactgaaagctctccacctccagggacaggatatggagcaacaagtggtgttctccatgtcctttgtacaaggagaagaaagtaatgacaaaatacctgtggccttgggcctcaaggaaaagaatctgtacctgtcctgcgtgttgaaagatgataagcccactctacagctggagagtgtagatcccaaaaattacccaaagaagaagatggaaaagcgatttgtcttcaacaagatagaaatcaataacaagctggaatttgagtctgcccagttccccaactggtacatcagcacctctcaagcagaaaacatgcccgtcttcctgggagggaccaaaggcggccaggatataactgacttcaccatgcaatttgtgtcttcttaaagagagct

SEQ ID NO: 82 - protein, 269 aa, Homo sapiens
MAEVPELASEMMAYYSGNEDDLFFEADGPKQMKCSFQDLDLCPLDGGIQLRISDHHYSKGFRQAASVVVAMDKLRKMLVPCPQTFQENDLSTFFPFIFEEEPIFFDTWDNEAYVHDAPVRSLNCTLRDSQQKSLVMSGPYELKALHLQGQDMEQQVVFSMSFVQGEESNDKIPVALGLKEKNLYLSCVLKDDKPTLQLESVDPKNYPKKKMEKRFVFNKIEINNKLEFESAQFPNWYISTSQAENMPVFLGGTKGGQDITDFTMQFVSS

SEQ ID NO: 83 - DNA, 689 bp, Homo sapiens
  CDS (2)..(658)
ctccttccaggacctggacctctgccctctggatggcggcatccagctacgaatctccgaccaccactacagcaagggcttcaggcaggccgcgtcagttgttgtggccatggacaagctgaggaagatgctggttccctgcccacagaccttccaggagaatgacctgagcaccttctttcccttcatctttgaagaagaacctatcttcttcgacacatgggataacggggcttatgtgcacgatgcacctgtacgatcactgaactgcacgctccgggactcacagcaaaaaagcttggtgatgtctggtccatatgaactgaaagctctccacctccaaggagaagaaagtaatgacaaaatacctgtggccttgggcctcaaggaaaagaatctgtacctgtcctgcgtgttgaaagatgataagcccactctacagctggagagtgtagatcccaaaaattacccaaagaagaagatggaaaagcgatttgtcttcaacaagatagaaatcaataacaagctggaatttgagtctgcccagttccccaactggtacatcagcacctctcaagcagaaaacatgcccgtcttcctgggagggaccaaaggcggccaggatataactgacttcaccatgcaatttgtgtcttcctaaagagagctgtacccagagagtcctgtgc

SEQ ID NO: 84 - protein, 219 aa, Homo sapiens
SFQDLDLCPLDGGIQLRISDHHYSKGFRQAASVVVAMDKLRKMLVPCPQTFQENDLSTFFPFIFEEEPIFFDTWDNGAYVHDAPVRSLNCTLRDSQQKSLVMSGPYELKALHLQGEESNDKIPVALGLKEKNLYLSCVLKDDKPTLQLESVDPKNYPKKKMEKRFVFNKIEINNKLEFESAQFPNWYISTSQAENMPVFLGGTKGGQDITDFTMQFVSS

SEQ ID NO: 85 - DNA, 689 bp, Homo sapiens
  CDS (2)..(658)
ctccttccaggacctggacctctgccctctggatggcggcatccagctacgaatctccgaccaccactacagcaagggcttcaggcaggccgcgtcagttgttgtggccatggacaagctgaggaagatgctggttccctgcccacagaccttccaggagaatgacctgagcaccttctttcccttcatctttgaagaagaacctatcttcttcgacacatgggataacgaggcttatgtgcacgatgcacctgtacgatcactgaactgcgcgctccgggactcacagcaaaaaagcttggtgatgtctggtccatatgaactgaaagctctccacctccaaggagaagaaagtaatgacaaaatacctgtggccttgggcctcaaggaaaagaatctgtacctgtcctgcgtgttgaaagatgataagcccactctacagctggagagtgtagatcccaaaaattacccaaagaagaagatggaaaagcgatttgtcttcaacaagatagaaatcaataacaagctggaatttgagtctgcccagttccccaactggtacatcagcacctctcaagcagaaaacatgcccgtcttcctgggagggaccaaaggcggccaggatataactgacttcaccatgcaatttgtgtcttcctaaagagagctgtacccagagagtcctgtgc

SEQ ID NO: 86 - protein, 219 aa, Homo sapiens
SFQDLDLCPLDGGIQLRISDHHYSKGFRQAASVVVAMDKLRKMLVPCPQTFQENDLSTFFPFIFEEEPIFFDTWDNEAYVHDAPVRSLNCALRDSQQKSLVMSGPYELKALHLQGEESNDKIPVALGLKEKNLYLSCVLKDDKPTLQLESVDPKNYPKKKMEKRFVFNKIEINNKLEFESAQFPNWYISTSQAENMPVFLGGTKGGQDITDFTMQFVSS

SEQ ID NO: 87 - DNA, 689 bp, Homo sapiens
  CDS (2)..(658)
ctccttccaggacctggacctctgccctctggatggcggcatccagctacgaatctccgaccaccactacagcaagggcttcaggcaggccgcgtcagttgttgtggccatggacaagctgaggaagatgctggttccctgcccacagaccttccaggagaatgacctgagcaccttctttcccttcatctttgaagaagaacctatcttcttcgacacatgggataacgaggcttatgtgcacgatgcacctgtacgatcactgaactgcacgctccgggactcacagcaaaaaagcttggtgatgtctggtccatatgaactgaaagctctccacctccaaggagaagaaagtaatgacaaaatacctgtgaccttgggcctcaaggaaaagaatctgtacctgtcctgcgtgttgaaagatgataagcccactctacagctggagagtgtagatcccaaaaattacccaaagaagaagatggaaaagcgatttgtcttcaacaagatagaaatcaataacaagctggaatttgagtctgcccagttccccaactggtacatcagcacctctcaagcagaaaacatgcccgtcttcctgggagggaccaaaggcggccaggatataactgacttcaccatgcaatttgtgtcttcctaaagagagctgtacccagagagtcctgtgc

SEQ ID NO: 88 - protein, 219 aa, Homo sapiens
SFQDLDLCPLDGGIQLRISDHHYSKGFRQAASVVVAMDKLRKMLVPCPQTFQENDLSTFFPFIFEEEPIFFDTWDNEAYVHDAPVRSLNCTLRDSQQKSLVMSGPYELKALHLQGEESNDKIPVTLGLKEKNLYLSCVLKDDKPTLQLESVDPKNYPKKKMEKRFVFNKIEINNKLEFESAQFPNWYISTSQAENMPVFLGGTKGGQDITDFTMQFVSS

SEQ ID NO: 89 - DNA, 689 bp, Homo sapiens
  CDS (2)..(658)
ctccttccaggacctggacctctgccctctggatggcggcatccagctacgaatctccgaccaccactacagcaagggcttcaggcaggccgcgtcagttgttgtggccatggacaagctgaggaagatgctggttccctgcccacagaccttccaggagaatgacctgagcaccttctttcccttcatctttgaagaagaacctatcttcttcgacacatgggataacgaggcttatgtgcacgatgcacctgtacgatcactgaactgcacgctccgggactcacagcaaaaaagcttggtgatgtctggtccatatgaactgaaagctctccacctccaaggagaagaaagtaatgacaaaatacctgtggccttgggcctcaaggaaaagaatctgtacctgtcctgcgtgttgaaagatgataagcccactctacagctggagagtgtagatcccaaaaattacccaaagaagaagatggaaaagcgatttgtcttcaacaagatagaaatcaatagcaagctggaatttgagtctgcccagttccccaactggtacatcagcacctctcaagcagaaaacatgcccgtcttcctgggagggaccaaaggcggccaggatataactgacttcaccatgcaatttgtgtcttcctaaagagagctgtacccagagagtcctgtgc

SEQ ID NO: 90 - protein, 219 aa, Homo sapiens
SFQDLDLCPLDGGIQLRISDHHYSKGFRQAASVVVAMDKLRKMLVPCPQTFQENDLSTFFPFIFEEEPIFFDTWDNEAYVHDAPVRSLNCTLRDSQQKSLVMSGPYELKALHLQGEESNDKIPVALGLKEKNLYLSCVLKDDKPTLQLESVDPKNYPKKKMEKRFVFNKIEINSKLEFESAQFPNWYISTSQAENMPVFLGGTKGGQDITDFTMQFVSS

SEQ ID NO: 91 - DNA, 689 bp, Homo sapiens
  CDS (2)..(658)
ctccttccaggacctggacctctgccctctggatggcggcatccagctacgaatctccgaccaccactacagcaagggcttcaggcaggccgcgtcagttgttgtggccatggacaagctgaggaagatgctggttccctgcccacagaccttccaggagaatgacctgagcaccttctttcccttcatctttgaagaagaacctatcttcttcgacacatgggataacgaggcttatgtgcacgatgcacctgtacgatcactgaactgcacgctccgggactcacagcaaaaaagcttggtgatgtctggtccatatgaactgaaagctctccacctccaaggagaagaaagtaatgacaaaatacctgtggccttgggcctcaaggaaaagaatctgtacctgtcctgcgtgttgaaagatgataagcccactctacagctggagagtgtagatcccaaaaattacccaaagaagaagatggaaaagcgatttgtcttcaacaagatagaaatcaataacaagctggaatttgagtctgcccagttccccaactggtacatcggcacctctcaagcagaaaacatgcccgtcttcctgggagggaccaaaggcggccaggatataactgacttcaccatgcaatttgtgtcttcctaaagagagctgtacccagagagtcctgtgc

SEQ ID NO: 92 - protein, 219 aa, Homo sapiens
SFQDLDLCPLDGGIQLRISDHHYSKGFRQAASVVVAMDKLRKMLVPCPQTFQENDLSTFFPFIFEEEPIFFDTWDNEAYVHDAPVRSLNCTLRDSQQKSLVMSGPYELKALHLQGEESNDKIPVALGLKEKNLYLSCVLKDDKPTLQLESVDPKNYPKKKMEKRFVFNKIEINNKLEFESAQFPNWYIGTSQAENMPVFLGGTKGGQDITDFTMQFVSS

SEQ ID NO: 93 - DNA, 689 bp, Homo sapiens
  CDS (2)..(658)
ctccttccaggacctggacctctgccctctggatggcggcatccagctacgaatctccgaccaccactacagcaagggcttcaggcaggccgcgtcagttgttgtggccatggacaagctgaggaagatgctggttccctgcccacagaccttccaggagaatgacctgagcaccttctttcccttcatctttgaagaagaacctatcttcttcgacacatgggataacgaggcttatgtgcacgatgcacctgtacgatcactgaactgcacgctccgggactcacagcaaaaaagcttggtgatgtctggtccatatgaactgaaagctctccacctccaaggagaagaaagtaatgacaaaatacctgtggccttgggcctcaaggaaaagaatctgtacctgtcctgcgtgttgaaagatgataagcccactctacagctggagagtgtagatcccaaaaattacccaaagaagaagatggaaaagcgatttgtcttcaacaagatagaaatcaataacaagctggaatttgagtctgcccagttccccaactggtacatcagcacctctcaagcagaaaacatgcccgtcttcctgggaggggccaaaggcggccaggatataactgacttcaccatgcaatttgtgtcttcctaaagagagctgtacccagagagtcctgtgc

SEQ ID NO: 94 - protein, 219 aa, Homo sapiens
SFQDLDLCPLDGGIQLRISDHHYSKGFRQAASVVVAMDKLRKMLVPCPQTFQENDLSTFFPFIFEEEPIFFDTWDNEAYVHDAPVRSLNCTLRDSQQKSLVMSGPYELKALHLQGEESNDKIPVALGLKEKNLYLSCVLKDDKPTLQLESVDPKNYPKKKMEKRFVFNKIEINNKLEFESAQFPNWYISTSQAENMPVFLGGAKGGQDITDFTMQFVSS

SEQ ID NO: 95 - DNA, 500 bp, Homo sapiens
  CDS (182)..(493)
cccggagccggaccggggccaccgcgcccgctctgctccgacaccgcgccccctggacagccgccctctcctccaggcccgtggggctggccctgcaccgccgagcttcccgggatgagggcccccggtgtggtcacccggcgcgccccaggtcgctgagggaccccggccaggcgcggagatgggggtgcacgaatgtcctgcctggctgtggcttctcctgtccctgctgtcgctccctctgggcctcccagtcctgggcgccccaccacgcctcatctgtgacagccgagtcctggagaggtacctcttggaggccaaggaggccgagaatatcacgaaggaagccatctcccctccagatgcggcctcagctgctccactccgaacaatcactgctgacactttccgcaaactcttccgagtctactccaatttcctccggggaaagctgaagctgtacacaggggaggcctgcaggacaggggacagatgaccag

SEQ ID NO: 96 - protein, 104 aa, Homo sapiens
MGVHECPAWLWLLLSLLSLPLGLPVLGAPPRLICDSRVLERYLLEAKEAENITKEAISPPDAASAAPLRTITADTFRKLFRVYSNFLRGKLKLYTGEACRTGDR

SEQ ID NO: 97 - DNA, 324 bp, Homo sapiens
  CDS (3)..(317)
cctggctatctgttctagaatgtcctgcctggctgtggcttctcctgtccctgctgtcgctccctctgggcctcccagtcctgggcgccccaccacgcctcatctgtgacagccgagtcctggagaggtacctcttggaggccaaggaggccgagaatatcacgaaggaagccatctcccctccagatgcggcctcagctgctccactccgaacaatcactgctgacactttccgcaaactcttccgagtctactccaatttcctccggggaaagctgaagctgtacacaggggaggcctgcaggacaggggacagatgaccag

SEQ ID NO: 98 - protein, 105 aa, Homo sapiens
WLSVLECPAWLWLLLSLLSLPLGLPVLGAPPRLICDSRVLERYLLEAKEAENITKEAISPPDAASAAPLRTITADTFRKLFRVYSNFLRGKLKLYTGEACRTGDR

SEQ ID NO: 99 - DNA, 336 bp, Homo sapiens
  CDS (1)..(324)
cgcggatccaccatgggggtgcacgaatgtcctgcctggctgtggcttctcctgtccctgctgtcgctccctctgggcctcccagtcctgggcgccccaccacgcctcatctgtgacagccgagtcctggagaggtacctcttggaggccaaggaggccgagaatatcacgaaggaagccatctcccctccagatgcggcctcagctgctccactccgaacaatcactgctgacactttccgcaaactcttccgagtctactccaatttcctccggggaaagctgaagctgtacacaggggaggcctgcaggacaggggacagatgactcgagcgg

SEQ ID NO: 100 - protein, 108 aa, Homo sapiens
RGSTMGVHECPAWLWLLLSLLSLPLGLPVLGAPPRLICDSRVLERYLLEAKEAENITKEAISPPDAASAAPLRTITADTFRKLFRVYSNFLRGKLKLYTGEACRTGDR

SEQ ID NO: 101 - DNA, 591 bp, Homo sapiens
  CDS (3)..(584)
cctggctatctgttctagaatgtcctgcctggctgtggcttctcctgtccctgctgtcgctccctctgggcctcccagtcctgggcgccccaccacgcctcatctgtgacagccgagtcctggagaggtacctcttggaggccaaggaggccgagaatatcacgacgggctgtgctgaacactgcagcttgaatgagaatatcactgtcccagacaccaaagttaatttctatgcctggaagaggatggaggtcgggcagcaggccgtagaagtctggcagggcctggccctgctgtcggaagctgtcctgcggggccaggccctgttgatcaactcttcccagccgtgggagcccctgcagctgcatgtggataaagccgtcagtggccttcgcagcctcaccactctgcttcgggctctgggagcccagaaggaagccatctcccctccagatgcggcctcagctgctccactccgaacaatcactgctgacactttccgcaaactcttccgagtctactccaatttcctccggggaaagctgaagctgtacacaggggaggcctgcaggacaggggacagatgaccag

SEQ ID NO: 102 - protein, 194 aa, Homo sapiens
WLSVLECPAWLWLLLSLLSLPLGLPVLGAPPRLICDSRVLERYLLEAKEAENITTGCAEHCSLNENITVPDTKVNFYAWKRMEVGQQAVEVWQGLALLSEAVLRGQALLINSSQPWEPLQLHVDKAVSGLRSLTTLLRALGAQKEAISPPDAASAAPLRTITADTFRKLFRVYSNFLRGKLKLYTGEACRTGDR

SEQ ID NO: 103 - DNA, 282 bp, Homo sapiens
  CDS (7)..(276)
ggatcctggcttctcctgtccctgctgtcgctccctctgggcctcccagtcctgggcgccccaccacgcctcatctgtgacagccgagtcctggagaggtacctcttggaggccaaggaggccgagaatatcacgaaggaagccatctcccctccagatgcggcctcagctgctccactccgaacaatcactgctgacactttccgcaaactcttccgagtctactccaatttcctccggggaaagctgaagctgtacacaggggaggcctgcaggctcgag

SEQ ID NO: 104 - protein, 90 aa, Homo sapiens
WLLLSLLSLPLGLPVLGAPPRLICDSRVLERYLLEAKEAENITKEAISPPDAASAAPLRTITADTFRKLFRVYSNFLRGKLKLYTGEACR

SEQ ID NO: 105 - DNA, 1012 bp, Homo sapiens
  CDS (476)..(814)
ctggctgtggcttctcctgtccctgctgtcgctccctctgggcctcccagtcctgggcgccccaccacgcctcatctgtgacagccgagtcctggagaggtacctcttggaggccaaggaggccgagaatatcacggtgagaccccttccccagcacattccacagaactcacgctcagggcttcagggaactcctcccagatccaggaacctggcacttggtttggggtggagttgggaagctagacactgcccccctacataagaataagtctggtggccccaaaccatacctggaaactaggcaaggagcaaagccagcagatcctacagcctgtgggccagggccagagccttcagggacccttgactccccgggctgtgtgcatttcagacgggctgtgctgaacactgcagcttgaatgagaatatcactgtcccagacaccaaagttaatttctatgcctggaagaggatggaggtcgggcagcaggccgtagaagtctggcagggcctggccctgctgtcggaagctgtcctgcggggccaggccctgttggtcaactcttcccagccgtgggagcccctgcagctgcatgtggataaagccgtcagtggccttcgcagcctcaccactctgcttcgggctctgggagcccagaaggaagccatctcccctccagatgcggcctcagctgctccactccgaacaatcactgctgacactttccgcaaactcttccgagtctactccaatttcctccggggaaagctgaagctgtacacaggggaggcctgcaggacaggggacagatgaccaggtgtgtccacctgggcatatccaccacttccctcaccaacattgcttgtgccacaccctcccccgccactcctgaaccccttgactccggggtggtgggaaccatgaatacaggatgggggctgcctcttgctctcttggggtccaagttttgtgtattcttcaacctcattgtcatgaattgaaaccacc

SEQ ID NO: 106 - protein, 113 aa, Homo sapiens [sequence omitted]

SEQ ID NO: 107 - DNA, 1012 bp, Homo sapiens; identical to SEQ ID NO: 105
  CDS (476)..(814)

SEQ ID NO: 108 - protein, 113 aa, Homo sapiens [sequence omitted]

SEQ ID NO: 109 - DNA, 1012 bp, Homo sapiens; identical to SEQ ID NO: 105
  CDS (476)..(814)

SEQ ID NO: 110 - protein, 113 aa, Homo sapiens [sequence omitted]

SEQ ID NO: 111 - DNA, 333 bp, Homo sapiens
  CDS (10)..(321)
cgcggatccatgggggtgcacgaatgtcctgcctggctgtggcttctcctgtccctgctgtcgctccctctgggcctcccagtcctgggcgccccaccacgcctcatctgtgacagccgagtcctggagaggtacctcttggaggccaaggaggccgagaatatcacgaaggaagccatctcccctccagatgcggcctcagctgctccactccgaacaatcactgctgacactttccgcaaactcttccgagtctactccaatttcctccggggaaagctgaagctgtacacaggggaggcctgcaggacaggggacagatgactcgagcgg

SEQ ID NO: 112 - protein, 104 aa, Homo sapiens; identical to SEQ ID NO: 96

SEQ ID NO: 113 - DNA, 330 bp, Homo sapiens
  CDS (22)..(321)
cgcggatccatgggggtgcacgaatgtcctgcctggctgtggcttctcctgtccctgctgtcgctccctctgggcctcccagtcctgggcgccccaccacgcctcatctgtgacagccgagtcctggagaggtacctcttggaggccaaggaggccgagaatatcacgaaggaagccatctcccctccagatgcggcctcagctgctccactccgaacaatcactgctgacactttccgcaaactcttccgagtctactccaatttcctccggggaaagctgaagctgtacacaggggaggcctgcaggacaggggacagactcgagcgg

SEQ ID NO: 114 - protein, 100 aa, Homo sapiens
ECPAWLWLLLSLLSLPLGLPVLGAPPRLICDSRVLERYLLEAKEAENITKEAISPPDAASAAPLRTITADTFRKLFRVYSNFLRGKLKLYTGEACRTGDR

SEQ ID NO: 115 - DNA, 510 bp, Homo sapiens
  CDS (1)..(510)
atgcgccgccgcctgtggctgggcctggcctggctgctgctggcgcgggcgccggacgccgcgggaaccccgagcgcgtcgcggggaccgcgcagctacccgcacctggagggcgacgtgcgctggcggcgcctcttctcctccactcacttcttcctgcgcgtggatcccggcggccgcgtgcagggcacccgctggcgccacggccaggacagcatcctggagatccgctctgtacacgtgggcgtcgtggtcatcaaagcagtgtcctcaggcttctacgtggccatgaaccgccggggccgcctctacgggtcgcgactctacaccgtggactgcaggttccgggagcgcatcgaagagaacggccacaacacctacgcctcacagcgctggcgccgccgcggccagcccatgttcctggcgctggacaggaggggggggccccggccaggcggccggacgcggcggtaccacctgtccgcccacttcctgcccgtcctggtctcc

SEQ ID NO: 116 - protein, 170 aa, Homo sapiens
MRRRLWLGLAWLLLARAPDAAGTPSASRGPRSYPHLEGDVRWRRLFSSTHFFLRVDPGGRVQGTRWRHGQDSILEIRSVHVGVVVIKAVSSGFYVAMNRRGRLYGSRLYTVDCRFRERIEENGHNTYASQRWRRRGQPMFLALDRRGGPRPGGRTRRYHLSAHFLPVLVS

SEQ ID NO: 117 - DNA, 527 bp, Homo sapiens
  CDS (3)..(527)
agatctccaccatgcgccgccgcctgtggctgggcctggcctggctgctgctggcgcgggcgccggacgccgcgggaaccccgagcgcgtcgcggggaccgcgcagctacccgcacctggagggcgacgtgcgctggcggcgtctcttctcctccactcacttcttcctgcgcgtggatcccggcggccgcgtgcagggcacccgctggcgccacggccaggacagcatcctggagatccgctctgtacacgtgggcgtcgtggtcatcaaagcagtgtcctcaggcttctacgtggccatgaaccgccggggccgcctctacgggtcgcgactctacaccgtggactgcaggttccgggagcgcatcgaagagaacggccacaacacctacgcctcacagcgctggcgccgccgcggccagcccatgttcctggcgctggacaggaggggggggccccggccaggcggccggacgcggcggtaccacctgtccgcccacttcctgcccgtcctggtctccctcgag

SEQ ID NO: 118 - protein, 175 aa, Homo sapiens
ISTMRRRLWLGLAWLLLARAPDAAGTPSASRGPRSYPHLEGDVRWRRLFSSTHFFLRVDPGGRVQGTRWRHGQDSILEIRSVHVGVVVIKAVSSGFYVAMNRRGRLYGSRLYTVDCRFRERIEENGHNTYASQRWRRRGQPMFLALDRRGGPRPGGRTRRYHLSAHFLPVLVSLE

SEQ ID NO: 119 - DNA, 527 bp, Homo sapiens; identical to SEQ ID NO: 117
  CDS (12)..(521)

SEQ ID NO: 120 - protein, 170 aa, Homo sapiens; identical to SEQ ID NO: 116

SEQ ID NO: 121 - DNA, 529 bp, Homo sapiens
  CDS (2)..(517)
cacccatatgcgccgccgcctgtggctgggcctggcctggctgctgctggcgcgggcgccggacgccgcgggaaccccgagcgcgtcgcggggaccgcgcagctacccgcacctggagggcgacgtgcgctggcggcgtctcttctcctccactcacttcttcctgcgcgtggatcccggcggccgcgtgcagggcacccgctggcgccacggccaggacagcatcctggagatccgctctgtacacgtgggcgtcgtggtcatcaaagcagtgtcctcaggcttctacgtggccatgaaccgccggggccgcctctacgggtcgcgactctacaccgtggactgcaggttccgggagcgcatcgaagagaacggccacaacacctacgcctcacagcgctggcgccgccgcggccagcccatgttcctggcgctggacaggaggggggggccccggccaggcggccggacgcggcggtaccacctgtccgcccacttcctgcccgtcctggtctcctagctcgagggc

SEQ ID NO: 122 - protein, 172 aa, Homo sapiens
THMRRRLWLGLAWLLLARAPDAAGTPSASRGPRSYPHLEGDVRWRRLFSSTHFFLRVDPGGRVQGTRWRHGQDSILEIRSVHVGVVVIKAVSSGFYVAMNRRGRLYGSRLYTVDCRFRERIEENGHNTYASQRWRRRGQPMFLALDRRGGPRPGGRTRRYHLSAHFLPVLVS

SEQ ID NO: 123 - DNA, 1340 bp, Homo sapiens
  CDS (130)..(639)
ccattggccggcgtccccgccccagcgaacccggccccgcccccgaggcgccccattggccccgccgcgcgaaggcagagccgcggacgcccgggagcgacgagcgcgcagcgaaccgggtgccgggtcatgcgccgccgcctgtggctgggcctggcctggctgctgctggcgcgggcgccggacgccgcgggaaccccgagcgcgtcgcggggaccgcgcagctacccgcacctggagggcgacgtgcgctggcggcgcctcttctcctccactcacttcttcctgcgcgtggatcccggcggccgcgtgcagggcacccgctggcgccacggccaggacagcatcctggagatccgctctgtacacgtgggcgtcgtggtcatcaaagcagtgtcctcaggcttctacgtggccatgaaccgccggggccgcctctacgggtcgcgactctacaccgtggactgcaggttccgggagcgcatcgaagagaacggccacaacacctacgcctcacagcgctggcgccgccgcggccagcccatgttcctggcgctggacaggaggggggggccccggccaggcggccggacgcggcggtaccacctgtccgcccacttcctgcccgtcctggtctcctgaggccctgagaggccggcggctccccaagccattggccggcgtccccgccccagcgaacccggccccgcccccgaggcgccccattggccccgccgcgcgaaggcagagccgcggacgcccgggagcgacgagcgcgcagcgaaccgggtgccgggtcatgcgccgccgcctgtggctgggcctggcctggctgctgctggcgcgggcgccggacgccgcgggaaccccgagcgcgtcgcggggaccgcgcagctacccgcacctggagggcgacgtgcgctggcggcgcctcttctcctccactcacttcttcctgcgcgtggatcccggcggccgcgtgcagggcacccgctggcgccacggccaggacagcatcctggagatccgctctgtacacgtgggcgtcgtggtcatcaaagcagtgtcctcaggcttctacgtggccatgaaccgccggggccgcctctacgggtcgcgactctacaccgtggactgcaggttccgggagcgcatcgaagagaacggccacaacacctacgcctcacagcgctggcgccgccgcggccagcccatgttcctggcgctggacaggaggggggggccccggccaggcggccggacgcggcggtaccacctgtccgcccacttcctgcccgtcctggtctcctgaggccctgagaggccggcggctccccaag

SEQ ID NO: 124 - protein, 170 aa, Homo sapiens; identical to SEQ ID NO: 116

SEQ ID NO: 125 - DNA, 943 bp, Homo sapiens
  CDS (3)..(482)
taggccgcctctggctgggcctagcctggctgctgttgacgcgggcaccgggcgctccgggagggtacccgcatctggagggcgacgtgcgctggcgccgcctcttctcctccactcactttttcctgcgtgtggaccttggtggtcgggtgcaggggacgcgttggcggcacggccaggacagtatagtggagatccgttctgtccgtgtgggcactgtggtgatcaaagctgtgtactcaggcttctatgtggccatgaatcgcaggggccgcctctatgggtcgcgggtctactctgtggactgtaggttccgggagcgcatcgaggagaacggctacaacacatacgcctcgcgacgttggaggcaccgcggccgacccatgttcctggcacttgacagccaaggcattcccaggcaaggcagacggacacgacggcaccaactgtccacacacttcctgccagtcttggtctcgtcttgaagggcctgccaatggttcaggaggcatgggcggcacacagggcctggaagatccggagctgaacaaccaagggccaggccagagaccctgggccaacacgagtctttatgtcacaagccgggcgcccgctggctgccgggcatggagacatggcagggtccctgcaagtgaagccagcgctcagggggatacacagaactggcagtttgcatccatctagtttggagatgagaacactctgggcacagcacggagaggtttggaggtgggaacacacaccaggtggatgaggaaagcaggcagggaggaccggggagggtggacatgtcacggagggcagggcccgcgtcagtggggacagagacatgttcgcccatgtggccgaagcttggggctggagttaagagcacttcttgctcttccaaggggcctgagtttaattcttccacatcaggctg

SEQ ID NO: 126 - protein, 160 aa, Homo sapiens
GRLWLGLAWLLLTRAPGAPGGYPHLEGDVRWRRLFSSTHFFLRVDLGGRVQGTRWRHGQDSIVEIRSVRVGTVVIKAVYSGFYVAMNRRGRLYGSRVYSVDCRFRERIEENGYNTYASRRWRHRGRPMFLALDSQGIPRQGRRTRRHQLSTHFLPVLVSS

SEQ ID NO: 127 - DNA, 444 bp, Homo sapiens
  CDS (1)..(444)
accccgagcgcgtcgcggggaccgcgcagctacccgcacctggagggcgacgtgcgctggcggcgcctcttctcctccactcacttcttcctgcgcgtggatcccggcggccgcgtgcagggcacccgctggcgccacggccaggacagcatcctggagatccgctctgtacacgtgggcgtcgtggtcatcaaagcagtgtcctcaggcttctacgtggccatgaaccgccggggccgcctctacgggtcgcgactctacaccgtggactgcaggttccgggagcgcatcgaagagaacggccacaacacctacgcctcacagcgctggcgccgccgcggccagcccatgttcctggcgctggacaggaggggggggccccggccaggcggccggacgcggcggtaccacctgtccgcccacttcctgcccgtcctggtctcc

SEQ ID NO: 128 - protein, 148 aa, Homo sapiens
TPSASRGPRSYPHLEGDVRWRRLFSSTHFFLRVDPGGRVQGTRWRHGQDSILEIRSVHVGVVVIKAVSSGFYVAMNRRGRLYGSRLYTVDCRFRERIEENGHNTYASQRWRRRGQPMFLALDRRGGPRPGGRTRRYHLSAHFLPVLVS

SEQ ID NO: 129 - DNA, 550 bp, Homo sapiens
  CDS (19)..(528)
cgaaccgggtgccgggtcatgcgccgccgcctgtggctgggcctggcctggctgctgctggcgcgggcgccggacgccgcgggaaccccgagcgcgtcgcggggaccgcgcagctacccgcacctggagggcgacgtgcgctggcggcgcctcttctcctccactcacttcttcctgcgcgtggatcccggcggccgcgtgcagggcacccgctggcgccacggccaggacagcatcctggagatccgctctgtacacgtgggcgtcgtggtcatcaaagcagtgtcctcaggcttctacgtggccatgaaccgccggggccgcctctacgggtcgcgactctacaccgtggactgcaggttccgggagcgcatcgaagagaacggccacaacacctacgcctcacagcgctggcgccgccgcggccagcccatgttcctggcgctggacaggaggggggggccccggccaggcggccggacgcggcggtaccacctgtccgcccacttcctgcccgtcctggtctcctgaggccctgagaggccggcgg

SEQ ID NO: 130 - protein, 170 aa, Homo sapiens; identical to SEQ ID NO: 116

SEQ ID NO: 131 - DNA, 456 bp, Homo sapiens
  CDS (7)..(450)
agatctaccccgagcgcgtcgcggggaccgcgcagctacccgcacctggagggcgacgtgcgctggcggcgtctcttctcctccactcacttcttcctgcgcgtggatcccggcggccgcgtgcagggcacccgctggcgccacggccaggacagcatcctggagatccgctctgtacacgtgggcgtcgtggtcatcaaagcagtgtcctcaggcttctacgtggccatgaaccgccggggccgcctctacgggtcgcgactctacaccgtggactgcaggttccgggagcgcatcgaagagaacggccacaacacctacgcctcacagcgctggcgccgccgcggccagcccatgttcctggcgctggacaggaggggggggccccggccaggcggccggacgcggcggtaccacctgtccgcccacttcctgcccgtcctggtctccctcgag

SEQ ID NO: 132 - protein, 148 aa, Homo sapiens; identical to SEQ ID NO: 128

SEQ ID NO: 133 - DNA, 538 bp, Homo sapiens
  CDS (17)..(526)
caccgagctccccaccatgcgccgccgcctgtggctgggcctggcctggctgctgctggcgcgggcgccggacgccgcgggaaccccgagcgcgtcgcggggaccgcgcagctacccgcacctggagggcgacgtgcgctggcggcgtctcttctcctccactcacttcttcctgcgcgtggatcccggcggccgcgtgcagggcacccgctggcgccacggccaggacagcatcctggagatccgctctgtacacgtgggcgtcgtggtcatcaaagcagtgtcctcaggcttctacgtggccatgaaccgccggggccgcctctacgggtcgcgactctacaccgtggactgcaggttccgggagcgcatcgaagagaacggccacaacacctacgcctcacagcgctggcgccgccgcggccagcccatgttcctggcgctggacaggaggggggggccccggccaggcggccggacgcggcggtaccacctgtccgcccacttcctgcccgtcctggtctcctaggtcgacggc

SEQ ID NO: 134 - protein, 170 aa, Homo sapiens; identical to SEQ ID NO: 116

SEQ ID NO: 135 - DNA, 530 bp, Homo sapiens
  CDS (12)..(527)
agatctccaccatgcgccgccgcctgtggctgggcctggcctggctgctgctggcgcgggcgccggacgccgcgggaaccccgagcgcgtcgcggggaccgcgcagctacccgcacctggagggcgacgtgcgctggcggcgtctcttctcctccactcacttcttcctgcgcgtggatcccggcggccgcgtgcagggcacccgctggcgccacggccaggacagcatcctggagatccgctctgtacacgtgggcgtcgtggtcatcaaagcagtgtcctcaggcttctacgtggccatgaaccgccggggccgcctctacgggtcgcgactctacaccgtggactgcaggttccgggagcgcatcgaagagaacggctacaacacctacgcctcacagcgctggcgccgccgcggccagcccatgttcctggcgctggacaggaggggggggccccggccaggcggccggacgcggcggtaccacctgtccgcccacttcctgcccgtcctggtctccctcgagtag

SEQ ID NO: 136 - protein, 172 aa, Homo sapiens
MRRRLWLGLAWLLLARAPDAAGTPSASRGPRSYPHLEGDVRWRRLFSSTHFFLRVDPGGRVQGTRWRHGQDSILEIRSVHVGVVVIKAVSSGFYVAMNRRGRLYGSRLYTVDCRFRERIEENGYNTYASQRWRRRGQPMFLALDRRGGPRPGGRTRRYHLSAHFLPVLVSLE

SEQ ID NO: 137 - DNA, 510 bp, Homo sapiens
  CDS (1)..(510)
atgcgccgccgcctgtggctgggcctggcctggctgctgctggcgcgggcgccggacgccgcgggaaccccgagcgcgtcgcggggaccgcgcagctacccgcacctggagggcgacgtgcgctggcggcgcctcttctcctccactcacttcttcctgcgcgtggatcccggcggccgcgtgcagggcacccgctggcgccacggccaggacagcatcctggagatccgctctgtacacgtgggcgtcgtggtcatcaaagcagtgtcctcaggcttctacgtggccatgaaccgccggggccgcctctacgggtcgcgactctacaccgtggactgcaggttccgggagcgcatcaaagagaacggccacaacacctacgcctcacagcgctggcgccgccgcggccagcccatgttcctggcgctggacaggaggggggggccccggccaggcggccggacgcggcggtaccacctgtccgcccacttcctgcccgtcctggtctcc

SEQ ID NO: 138 - protein, 170 aa, Homo sapiens
MRRRLWLGLAWLLLARAPDAAGTPSASRGPRSYPHLEGDVRWRRLFSSTHFFLRVDPGGRVQGTRWRHGQDSILEIRSVHVGVVVIKAVSSGFYVAMNRRGRLYGSRLYTVDCRFRERIKENGHNTYASQRWRRRGQPMFLALDRRGGPRPGGRTRRYHLSAHFLPVLVS

SEQ ID NO: 139 - DNA, 1081 bp, Homo sapiens
  CDS (19)..(1074)
gcgccctctcgcgcggcgatggccccactcggatacttcttactcctctgcagcctgaagcaggctctgggcagctacccgatctggtggtcgctggctgttgggccacagtattcctccctgggctcgcagcccatcctgtgtgccagcatcccgggcctggtccccaagcagctccgcttctgcaggaactacgtggagatcatgcccagcgtggccgagggcatcaagattggcatccaggagtgccagcaccagttccgcggccgccggtggaactgcaccaccgtccacgacagcctggccatcttcgggcccgtgctggacaaagctaccagggagtcggcctttgtccacgccattgcctcagccggtgtggcctttgcagtgacacgctcatgtgcagaaggcacggccgccatctgtggctgcagcagccgccaccagggctcaccaggcaagggctggaagtggggtggctgtagcgaggacatcgagtttggtgggatggtgtctcgggagttcgccgacgcccgggagaaccggccagatgcccgctcagccatgaaccgccacaacaacgaggctgggcgccaggccatcgccagccacatgcacctcaagtgcaagtgccacgggctgtcgggcagctgcgaggtgaagacatgctggtggtcgcaacccgacttccgcgccatcggtgacttcctcaaggacaagtacgacagcgcctcggagatggtggtggagaagcaccgggagtcccgcggctgggtggagaccctgcggccgcgctacacctacttcaaggtgcccacggagcgcgacctggtctactacgaggcctcgcccaacttctgcgagcccaaccctgagacgggctccttcggcacgcgcgaccgcacctgcaacgtcagctcgcacggcatcgacggctgcgacctgctgtgctgcggccgcggccacaacgcgcgagcggagcggcgccgggagaagtgccgctgcgtgttccactggtgctgctacgtcagctgccaggagtgcacgcgcgtctacgacgtgcacacctgcaagtaggcac

SEQ ID NO: 140 - protein, 352 aa, Homo sapiens
MAPLGYFLLLCSLKQALGSYPIWWSLAVGPQYSSLGSQPILCASIPGLVPKQLRFCRNYVEIMPSVAEGIKIGIQECQHQFRGRRWNCTTVHDSLAIFGPVLDKATRESAFVHAIASAGVAFAVTRSCAEGTAAICGCSSRHQGSPGKGWKWGGCSEDIEFGGMVSREFADARENRPDARSAMNRHNNEAGRQAIASHMHLKCKCHGLSGSCEVKTCWWSQPDFRAIGDFLKDKYDSASEMVVEKHRESRGWVETLRPRYTYFKVPTERDLVYYEASPNFCEPNPETGSFGTRDRTCNVSSHGIDGCDLLCCGRGHNARAERRREKCRCVFHWCCYVSCQECTRVYDVHTCK

SEQ ID NO: 141 - DNA, 1014 bp, Homo sapiens
  CDS (1)..(1014)
ggatccagctacccgatctggtggtcgctggctgttgggccacagtattcctccctgggctcgcagcccatcctgtgtgccagcatcccgggcctggtccccaagcagctccgcttctgcaggaactacgtggagatcatgcccagcgtggccgagggcatcaagattggcatccaggagtgccagcaccagttccgcggccgccggtggaactgcaccaccgtccacgacagcctggccatcttcgggcccgtgctggacaaagctaccagggagtcggcctttgtccacgccattgcctcagccggtgtggcctttgcagtgacacgctcatgtgcagaaggcacggccgccatctgtggctgcagcagccgccaccagggctcaccaggcaagggctggaagtggggtggctgtagcgaggacatcgagtttggtgggatggtgtctcgggagttcgccgacgcccgggagaaccggccagatgcccgctcagccatgaaccgccacaacaacgaggctgggcgccaggccatcgccagccacatgcacctcaagtgcaagtgccacgggctgtcgggcagctgcgaggtgaagacatgctggtggtcgcaacccgacttccgcgccatcggtgacttcctcaaggacaagtacgacagcgcctcggagatggtggtggagaagcaccgggagtcccgcggctgggtggagaccctgcggccgcgctacacctacttcaaggtgcccacggagcgcgacctggtctactacgaggcctcgcccaacttctgcgagcccaaccctgagacgggctccttcggcacgcgcgaccgcacctgcaacgtcagctcgcacggcatcgacggctgcgacctgctgtgctgcggccgcggccacaacgcgcgagcggagcggcgccgggagaagtgccgctgcgtgttccactggtgctgctacgtcagctgccaggagtgcacgcgcgtctacgacgtgcacacctgcaagctcgag

SEQ ID NO: 142 - protein, 338 aa, Homo sapiens
GSSYPIWWSLAVGPQYSSLGSQPILCASIPGLVPKQLRFCRNYVEIMPSVAEGIKIGIQECQHQFRGRRWNCTTVHDSLAIFGPVLDKATRESAFVHAIASAGVAFAVTRSCAEGTAAICGCSSRHQGSPGKGWKWGGCSEDIEFGGMVSREFADARENRPDARSAMNRHNNEAGRQAIASHMHLKCKCHGLSGSCEVKTCWWSQPDFRAIGDFLKDKYDSASEMVVEKHRESRGWVETLRPRYTYFKVPTERDLVYYEASPNFCEPNPETGSFGTRDRTCNVSSHGIDGCDLLCCGRGHNARAERRREKCRCVFHWCCYVSCQECTRVYDVHTCKLE

SEQ ID NO: 143 - DNA, 1116 bp, Homo sapiens
  CDS (31)..(1086)
tcccggccctccgcgccctctcgcgcggcgatggccccactcggatacttcttactcctctgcagcctgaagcaggctctgggcagctacccgatctggtggtcgctggctgttgggccacagtattcctccctgggctcgcagcccatcctgtgtgccagcatcccgggcctggtccccaagcagctccgcttctgcaggaactacgtggagatcatgcccagcgtggccgagggcatcaagattggcatccaggagtgccagcaccagttccgcggccgccggtggaactgcaccaccgtccacgacagcctggccatcttcgggcccgtgctggacaaagctaccagggagtcggcctttgtccacgccattgcctcagccggtgtggcctttgcagtgacacgctcatgtgcagaaggcacggccgccatctgtggctgcagcagccgccaccagggctcaccaggcaagggctggaagtggggtggctgtagcgaggacatcgagtttggtgggatggtgtctcgggagttcgccgacgcccgggagaaccggccagatgcccgctcagccatgaaccgccacaacaacgaggctgggcgccaggccatcgccagccacatgcacctcaagtgcaagtgccacgggctgtcgggcagctgcgaggtgaagacatgctggtggtcgcaacccgacttccgcgccatcggtgacttcctcaaggacaagtacgacagcgcctcggagatggtggtggagaagcaccgggagtcccgcggctgggtggagaccctgcggccgcgctacacctacttcaaggtgcccacggagcgcgacctggtctactacgaggcctcgcccaacttctgcgagcccaaccctgagacgggctccttcggcacgcgcgaccgcacctgcaacgtcagctcgcacggcatcgacggctgcgacctgctgtgctgcggccgcggccacaacgcgcgagcggagcggcgccgggagaagtgccgctgcgtgttccactggtgctgctacgtcagctgccaggagtgcacgcgcgtctacgacgtgcacacctgcaagtaggcaccggccgcggctccccctggacgg

SEQ ID NO: 144 - protein, 352 aa, Homo sapiens; identical to SEQ ID NO: 140

SEQ ID NO: 145 - DNA, 1060 bp, Homo sapiens
  CDS (2)..(1057)
gatggccccactcggatacttcttactcctctgcagcctgaagcaggctctgggcagctacccgatctggtggtcgctggctgttgggccacagtattcctccctgggctcgcagcccatcctgtgtgccagcatcccgggcctggtccccaagcagctccgcttctgcaggaactacgtggagatcatgcccagcgtggccgagggcatcaagattggcatccaggagtgccagcaccagttccgcggccgccggtggaactgcaccaccgtccacgacagcctggccatcttcgggcccgtgctggacaaagctaccagggagtcggcctttgtccacgccattgcctcagccggtgtggcctttgcagtgacacgctcatgtgcagaaggcacggccgccatctgtggctgcagcagccgccaccagggctcaccaggcaagggctggaagtggggtggctgtagcgaggacatcgagtttggtgggatggtgtctcgggagttcgccgacgcccgggagaaccggccagatgcccgctcagccatgaaccgccacaacaacgaggctgggcgccaggccatcgccagccacatgcacctcaagtgcaagtgccacgggctgtcgggcagctgcgaggtgaagacatgctggtggtcgcaacccgacttccgcgccatcggtgacttcctcaaggacaagtacgacagcgcctcggagatggtggtggagaagcaccgggagtcccgcggctgggtggagaccctgcggccgcgctacacctacttcaaggtgcccacggagcgcgacctggtctactacgaggcctcgcccaacttctgcgagcccaaccctgagacgggctccttcggcacgcgcgaccgcacctgcaacgtcagctcgcacggcatcgacggctgcgacctgctgtgctgcggccgcggccacaacgcgcgagcggagcggcgccgggagaagtgccgctgcgtgttccactggtgctgctacgtcagctgccaggagtgcacgcgcgtctacgacgtgcacacctgcaagtag

SEQ ID NO: 146 - protein, 352 aa, Homo sapiens; identical to SEQ ID NO: 140

SEQ ID NO: 147 - DNA, 1002 bp, Homo sapiens
  CDS (1)..(1002)
agctacccgatctggtggtcgctggctgttgggccacagtattcctccctgggctcgcagcccatcctgtgtgccagcatcccgggcctggtccccaagcagctccgcttctgcaggaactacgtggagatcatgcccagcgtggccgagggcatcaagattggcatccaggagtgccagcaccagttccgcggccgccggtggaactgcaccaccgtccacgacagcctggccatcttcgggcccgtgctggacaaagctaccagggagtcggcctttgtccacgccattgcctcagccggtgtggcctttgcagtgacacgctcatgtgcagaaggcacggccgccatctgtggctgcagcagccgccaccagggctcaccaggcaagggctggaagtggggtggctgtagcgaggacatcgagtttggtgggatggtgtctcgggagttcgccgacgcccgggagaaccggtcagatgcccgctcagccatgaaccgccacaacaacgaggctgggcgccaggccatcgccagccacatgcacctcaagtgcaagtgccacgggctgtcgggcagctgcgaggtgaagacatgctggtggtcgcaacccgacttccgcgccatcggtgacttcctcaaggacaagtacgacagcgcctcggagatggtggtggagaagcaccgggagtcccgcggctgggtggagaccctgcggccgcgctacacctacttcaaggtgcccacggagcgcgacctggtctactacgaggcctcgcccaacttctgcgagcccaaccctgagacgggctccttcggcacgcgcgaccgcacctgcaacgtcagctcgcacggcatcgacggctgcgacctgctgtgctgcggccgcggccacaacgcgcgagcggagcggcgccgggagaagtgccgctgcgtgttccactggtgctgctacgtcagctgccaggagtgcacgcgcgtctacgacgtgcacacctgcaag

SEQ ID NO: 148 - protein, 334 aa, Homo sapiens
SYPIWWSLAVGPQYSSLGSQPILCASIPGLVPKQLRFCRNYVEIMPSVAEGIKIGIQECQHQFRGRRWNCTTVHDSLAIFGPVLDKATRESAFVHAIASAGVAFAVTRSCAEGTAAICGCSSRHQGSPGKGWKWGGCSEDIEFGGMVSREFADARENRSDARSAMNRHNNEAGRQAIASHMHLKCKCHGLSGSCEVKTCWWSQPDFRAIGDFLKDKYDSASEMVVEKHRESRGWVETLRPRYTYFKVPTERDLVYYEASPNFCEPNPETGSFGTRDRTCNVSSHGIDGCDLLCCGRGHNARAERRREKCRCVFHWCCYVSCQECTRVYDVHTCK

SEQ ID NO: 149 - DNA, 849 bp, Homo sapiens
  CDS (1)..(849)
agctacccgatctggtggtcgctggctgttgggccacagtattcctccctgggctcgcagcccatcctgtgtgccagcatcccgggcctggtccccaagcagctccgcttctgcaggaactacgtggagatcatgcccagcgtggccgagggcatcaagattggcatccaggagtgccagcaccagttccgcggccgccggtggaactgcaccaccgtccacgacagcctggccatcttcgggcccgtgctggacaaagctaccagggagtcggcctttgtccacgccattgcctcagccggtgtggcctttgcagtgacacgctcatgtgcagaaggcacggccgccatctgtggctgcagcagccgccaccagggctcaccaggcaagggctggaagtggggtggctgtagcgaggacatcgagtttggtgggatggtgtctcgggagttcgccgacgcccgggagaaccggccagatgcccgctcagccatgaaccgccacaacaacgaggctgggcgccaggccatcgccagccacatgcacctcaagtgcaagtgccacgggctgtcgggcagctgcgaggtgaagacatgctggtggtcgcaacccgacttccgcgccatcggtgacttcctcaaggacaagtacgacagcgcctcggagatggtggtggagaagcaccgggagtcccgcggctgggtggagaccctgcggccgcgctacacctacttcaaggtgcccacggagcgcgacctggtctactacgaggcctcgcccaacttctgcgagcccaaccctgagacgggctccttcggcacgcgcgtctacgacgtgcacacctgcaag

SEQ ID NO: 150 - protein, 283 aa, Homo sapiens
SYPIWWSLAVGPQYSSLGSQPILCASIPGLVPKQLRFCRNYVEIMPSVAEGIKIGIQECQHQFRGRRWNCTTVHDSLAIFGPVLDKATRESAFVHAIASAGVAFAVTRSCAEGTAAICGCSSRHQGSPGKGWKWGGCSEDIEFGGMVSREFADARENRPDARSAMNRHNNEAGRQAIASHMHLKCKCHGLSGSCEVKTCWWSQPDFRAIGDFLKDKYDSASEMVVEKHRESRGWVETLRPRYTYFKVPTERDLVYYEASPNFCEPNPETGSFGTRVYDVHTCK

SEQ ID NO: 151 - DNA, 1056 bp, Homo sapiens
  CDS (1)..(1056)
atggccccactcggatacttcttactcctctgcagcctgaagcaggctctgggcagctacccgatctggtggtcgctggctgttgggccacagtattcctccctgggctcgcagcccatcctgtgtgccagcatcccgggcctggtccccaagcagctccgcttctgcaggaactacgtggagatcatgcccagcgtggccgagggcatcaagattggcatccaggagtgccagcaccagttccgcggccgccggtggaactgcaccaccgtccacgacagcctggccatcttcgggcccgtgctggacaaagctaccagggagtcggcctttgtccacgccattgcctcagccggtgtggcctttgcagtgacacgctcatgtgcagaaggcacggccgccatctgtggctgcagcagccgccaccagggctcaccaggcaagggctggaagtggggtggctgtagcgaggacatcgagtttggtgggatggtgtctcgggagttcgccgacgcccgggagaaccggccagatgcccgctcagccatgaaccgccacaacaacgaggctgggcgccaggccatcgccagccacatgcacctcaagtgcaagtgccacgggctgtcgggcagctgcgaggtgaagacatgctggtggtcgcaacccgacttccgcgccatcggtgacttcctcaaggacaagtacgacagcgcctcggagatggtggtggagaagcaccgggagtcccgcggctgggtggagaccctgcggccgcgctacacctacttcaaggtgcccacggagcgcgacctggtctactacgaggcctcgcccaacttctgcgagcccaaccctgagacgggctccttcggcacgcgcgaccgcacctgcaacgtcagctcgcacggcatcgacggctgcgacctgctgtgctgcggccgcggccacaacgcgcgagcggagcggcgccgggagaagtgccgctgcgtgttccactggtgctgctacgtcagctgccaggagtgcacgcgcgtctacgacgtgcacacctgcaag

SEQ ID NO: 152 - protein, 352 aa, Homo sapiens; identical to SEQ ID NO: 140

SEQ ID NO: 153 - DNA, 1099 bp, Homo sapiens
  CDS (2)..(1087)
caccggatccaccatggccccactcggctacttcttactcctctgcagcctgaagcaggctctgggcagctacccgatctggtggtcgctggctgttgggccacagtattcctccctgggctcgcagcccatcctgtgtgccagcatccctggcctggtccccaagcagctccgcttctgcaggaactacgtggagatcatgcccagcgtggccgagggcatcaagattggcatccaggagtgccagcaccagttccgcggccgccggtggaactgcaccaccgtccacgacagcctggccatcttcgggcccgtgctggacaaagctaccagggagtcggcctttgtccacgccattgcctcagccggtgtggcctttgcagtgacacgctcatgtgcagaaggcacggccgccatctgtggctgcagcagccgccaccagggctcaccaggcaagggctggaagtggggtggctgtagcgaggacatcgagtttggtgggatggtgtctcgggagttcgccgacgcccgggagaaccggccagatgcccgctcagccatgaaccgccacaacaacgaggctgggcgccaggccatcgccagccacatgcacctcaagtgcaagtgccacgggctgtcgggcagctgcgaggtgaagacatgctggtggtcgcaacccgacttccgcgccatcggtgacttcctcaaggacaagtacgacagcgcctcggagatggtggtggagaagcaccgggagtcccgcggctgggtggagaccctgcggccgcgctacacctacttcaaggtgcccacggagcgcgacctggtctactacgaggcctcgcccaacttctgcgagcccaaccctgagacgggctccttcggcacgcgcgaccgcacctgcaacgtcagctcgcacggcatcgacggctgcgacctgctgtgctgcggccgcggccacaacgcgcgagcggagcggcgccgggagaagtgccgctgcgtgttccactggtgctgctacgtcagctgccaggagtgcacgcgcgtctacgacgtgcacacctgcaagcaccatcaccaccatcactgactcgagcgg

SEQ ID NO: 154 - protein, 362 aa, Homo sapiens
TGSTMAPLGYFLLLCSLKQALGSYPIWWSLAVGPQYSSLGSQPILCASIPGLVPKQLRFCRNYVEIMPSVAEGIKIGIQECQHQFRGRRWNCTTVHDSLAIFGPVLDKATRESAFVHAIASAGVAFAVTRSCAEGTAAICGCSSRHQGSPGKGWKWGGCSEDIEFGGMVSREFADARENRPDARSAMNRHNNEAGRQAIASHMHLKCKCHGLSGSCEVKTCWWSQPDFRAIGDFLKDKYDSASEMVVEKHRESRGWVETLRPRYTYFKVPTERDLVYYEASPNFCEPNPETGSFGTRDRTCNVSSHGIDGCDLLCCGRGHNARAERRREKCRCVFHWCCYVSCQECTRVYDVHTCKHHHHHH

SEQ ID NO: 155 - DNA, 1071 bp, Homo sapiens
  CDS (10)..(1065)
ggatccaccatggccccactcggatacttcttactcctctgcagcctgaagcaggctctgggcagctacccgatctggtggtcgctggctgttgggccacagtattcctccctgggctcgcagcccatcctgtgtgccagcatcccgggcctggtccccaagcagctccgcttctgcaggaactacgtggagatcatgcccagcgtggccgagggcatcaagattggcatccaggagtgccagcaccagttccgcggccgccggtggaactgcaccaccgtccacgacagcctggccatcttcgggcccgtgctggacaaagctaccagggagtcggcctttgtccacgccattgcctcagccggtgtggcctttgcagtgacacgctcatgtgcagaaggcacggccgccatctgtggctgcagcagccgccaccagggctcaccaggcaagggctggaagtggggtggctgtagcgaggacatcgagtttggtgggatggtgtctcgggagttcgccgacgcccgggagaaccggccagatgcccgctcagccatgaaccgccacaacaacgaggctgggcgccaggccatcgccagccacatgcacctcaagtgcaagtgccacgggctgtcgggcagctgcgaggtgaagacatgctggtggtcgcaacccgacttccgcgccatcggtgacttcctcaaggacaagtacgacagcgcctcggagatggtggtggagaagcaccgggagtcccgcggctgggtggagaccctgcggccgcgctacacctacttcaaggtgcccacggagcgcgacctggtctactacgaggcctcgcccaacttctgcgagcccaaccctgagacgggctccttcggcacgcgcgaccgcacctgcaacgtcagctcgcacggcatcgacggctgcgacctgctgtgctgcggccgcggccacaacgcgcgagcggagcggcgccgggagaagtgccgctgcgtgttccactggtgctgctacgtcagctgccaggagtgcacgcgcgtctacgacgtgcacacctgcaagctcgag

SEQ ID NO: 156 - protein, 352 aa, Homo sapiens; identical to SEQ ID NO: 140

SEQ ID NO: 157 - DNA, 2932 bp, Homo sapiens
  CDS (79)..(1134)
agctcccagggcccggccccccccggcgctcacgctctcggggcggactcccggccctccgcgccctcccgcgcggcgatggccccactcggatacttcttactcctctgcagcctgaagcaggctctgggcagctacccgatctggtggtcgctggctgttgggccacagtattcctccctgggctcgcagcccatcctgtgtgccagcatcccgggcctggtccccaagcagctccgcttctgcaggaactacgtggagatcatgcccagcgtggccgagggcatcaagattggcatccaggagtgccagcaccagttccgcggccgccggtggaactgcaccaccgtccacgacagcctggccatcttcgggcccgtgctggacaaagctaccagggagtcggcctttgtccacgccattgcctcagccggtgtggcctttgcagtgacacgctcatgtgcagaaggcacggccgccatctgtggctgcagcagccgccaccagggctcaccaggcaagggctggaagtggggtggctgtagcgaggacatcgagtttggtgggatggtgtctcgggagttcgccgacgcccgggagaaccggccagatgcccgctcagccatgaaccgccacaacaacgaggctgggcgccaggccatcgccagccacatgcacctcaagtgcaagtgccacgggctgtcgggcagctgcgaggtgaagacatgctggtggtcgcaacccgacttccgcgccatcggtgacttcctcaaggacaagtacgacagcgcctcggagatggtggtggagaagcaccgggagtcccgcggctgggtggagaccctgcggccgcgctacacctacttcaaggtgcccacggagcgcgacctggtctactacgaggcctcgcccaacttctgcgagcccaaccctgagacgggctccttcggcacgcgcgaccgcacctgcaacgtcagctcgcacggcatcgacggctgcgacctgctgtgctgcggccgcggccacaacgcgcgagcggagcggcgccgggagaagtgccgctgcgtgttccactggtgctgctacgtcagctgccaggagtgcacgcgcgtctacgacgtgcacacctgcaagtaggcaccggccgcggctccccctggacggggcgggccctgcctgagggtgggcttttccctgggtggagcaggactcccacctaaacggggcagtactcctccctgggggcgggactcctccctgggggtggggctcctacctgggggcagaactcctacctgaaggcagggctcctccctggagccagtgtctcctctctggtggctgggctgctcctgaatgaggcggagctccaggatggggaggggctctgcgttggcttctccctggggacggggctcccctggacagaggcggggctacagattgggcggggcttctcttgggtgggacagggcttctcctgcgggggcgaggcccctcccagtaagggcgtggctctgggtgggcggggcactaggtaggcttctacctgcaggcggggctcctcctgaaggaggcggggctctaggatggggcacggctctggggtaggctgctccctgagggcggagcgcctccttaggagtggggttttatggtggatgaggcttcttcctggatggggcagagcttctcctgaccagggcaaggccccttccacgggggctgtggctctgggtgggcgtggcctgcataggctccttcctgtgggtggggcttctctgggaccaggctccaatggggcggggcttctctccgcgggtgggactcttccctgggaaccgccctcctgattaaggcgtggcttctgcaggaatcccggctccagagcaggaaattcagcccaccagccacctcatccccaaccccctgtaaggttccatccacccctgcgtcgagctgggaaggttccatgaagcgagtcgggtccccaacccgtgcccctgggatccgagggcccctctccaagcgcctggctttggaatgctccaggcgcgccgacgcctgtgccaccccttcctcagcctggggtttgaccacccacctgaccaggggccctacctggggaaagcctgaagggcctcccagcccccaaccccaagaccaagcttagtcctgggagaggacagggacttcgcagaggcaagcgaccgaggccctcccaaagaggcccgccctgcccgggctcccacaccgtcaggtactcctgccagggaactggcctgctgcgccccaggccccgcccgtctctgctctgctcagctgcgcccccttctttgcagctgcccagcccctcctccctgccctcgggtctccccacctgcactccatccagctacaggagagatagaagcctctcgtcccgtccctccctttcctccgcctgtccacagccccttaagggaaaggtaggaagagaggtccagccccccaggctgcccagagctgctggtctcatttgggggcgttcgggaggtttggggggcatcaaccccccgactgtgctgctcgcgaaggtcccacagccctgagatgggccggcccccttcctggcccctcatggcgggactggagaaatggtccgctttcctggagccaatggcccggcccctcctgactcatccgcctggcccgggaatgaatggggaggccgctgaacccacccggcccatatccctggttgcctcatggccagcgcccctcagcctctgccactgtgaaccggctcccaccctcaaggtgcggggagaagaagcggccaggcggggcgccccaagagcccaaaagagggcacaccgccatcctctgcctcaaattctgcgtttttggttttaatgttatatctgatgctgctatatccactgtccaacgg

SEQ ID NO: 158 - protein, 352 aa, Homo sapiens; identical to SEQ ID NO: 140

SEQ ID NO: 159 - DNA, 1014 bp, Homo sapiens; identical to SEQ ID NO: 141
  CDS (7)..(1008)

SEQ ID NO: 160 - protein, 334 aa, Homo sapiens
SYPIWWSLAVGPQYSSLGSQPILCASIPGLVPKQLRFCRNYVEIMPSVAEGIKIGIQECQHQFRGRRWNCTTVHDSLAIFGPVLDKATRESAFVHAIASAGVAFAVTRSCAEGTAAICGCSSRHQGSPGKGWKWGGCSEDIEFGGMVSREFADARENRPDARSAMNRHNNEAGRQAIASHMHLKCKCHGLSGSCEVKTCWWSQPDFRAIGDFLKDKYDSASEMVVEKHRESRGWVETLRPRYTYFKVPTERDLVYYEASPNFCEPNPETGSFGTRDRTCNVSSHGIDGCDLLCCGRGHNARAERRREKCRCVFHWCCYVSCQECTRVYDVHTCK

SEQ ID NO: 161 - DNA, 1081 bp, Homo sapiens
  CDS (14)..(1069)
caccggatccaccatggccccactcggatacttcttactcctctgcagcctgaagcaggctctgggcagctacccgatctggtggtcgctggctgttgggccacagtattcctccctgggctcgcagcccatcctgtgtgccagcatcccgggcctggtccccaagcagctccgcttctgcaggaactacgtggagatcatgcccagcgtggccgagggcatcaagattggcatccaggagtgccagcaccagttccgcggccgccggtggaactgcaccaccgtccacgacagcctggccatcttcgggcccgtgctggacaaagctaccagggagtcggcctttgtccacgccattgcctcagccggtgtggcctttgcagtgacacgctcatgtgcagaaggcacggccgccatctgtggctgcagcagccgccaccagggctcaccaggcaagggctggaagtggggtggctgtagcgaggacatcgagtttggtgggatggtgtctcgggagttcgccgacgcccgggagaaccggccagatgcccgctcagccatgaaccgccacaacaacgaggctgggcgccaggccatcgccagccacatgcacctcaagtgcaagtgccacgggctgtcgggcagctgcgaggtgaagacatgctggtggtcgcaacccgacttccgcgccatcggtgacttcctcaaggacaagtacgacagcgcctcggagatggtggtggagaagcaccgggagtcccgcggctgggtggagaccctgcggccgcgctacacctacttcaaggtgcccacggagcgcgacctggtctactacgaggcctcgcccaacttctgcgagcccaaccctgagacgggctccttcggcacgcgcgaccgcacctgcaacgtcagctcgcacggcatcgacggctgcgatctgctgtgctgcggccgcggccacaacgcgcgagcggagcggcgccgggagaagtgccgctgcgtgttccactggtgctgctacgtcagctgccaggagtgcacgcgcgtctacgacgtgcacacctgcaagtagctcgagggc

SEQ ID NO: 162 - protein, 352 aa, Homo sapiens; identical to SEQ ID NO: 140

SEQ ID NO: 163 - DNA, 947 bp, Homo sapiens
  CDS (5)..(943)
cttgatggccccactcggatacttcttactcctctgcagcctgaagcaggctctgggcagctacccgatctggtggtcgctggctgttgggccacagtattcctccctgggctcgcagcccatcctgtgtgccagcatcccgggcctggtccccaagcagctccgcttctgcaggaactacgtggagatcatgcccagcgtggccgagggcatcaagatcggcatccaggagtgccagcaccagttccgcggccgccggtggaactgcaccaccgtccacgacagcctggccatcttcgggcccgtgctggacaaagctaccagggagtcggcctttgtccacgccattgcctcagccggtgtggcctttgcagtgacacgctcatgtgcagaaggcgcggccgccatctgtggctgcagcagccgccaccagggctcaccaggcaagggctggaagtggggtggctgtagcgaggacatcgagtttggtgggatggtgtctcgggagttcgccgacgcccgggagaaccggccagatgtccgctcagccatgaaccgccacaacaacgaggctgggcgccaggacaagtacgacagcgcctcggagatggtggtggagaagcaccgggagtcccgcggctgggtggagaccctgcggccgcgctacacctacttcaaggtgcccacggagcgcgacctggtctactacgaggcctcgcccaacttctgcgagcccaaccctgagacgggctccttcggcacgcgcgaccgcacctgcaacgtcagctcgcacggcatcgacggctgcgacctgctgtgctgcggccgcggccacaacgcgcgagcggagcggcgccgggagaagtgccgctgcgtgttccactggtgctgctacgtcagctgccaggagtgcacgcgcgtctacgacgtgcacacctgcaagtagg

SEQ ID NO: 164 - protein, 313 aa, Homo sapiens
MAPLGYFLLLCSLKQALGSYPIWWSLAVGPQYSSLGSQPILCASIPGLVPKQLRFCRNYVEIMPSVAEGIKIGIQECQHQFRGRRWNCTTVHDSLAIFGPVLDKATRESAFVHAIASAGVAFAVTRSCAEGAAAICGCSSRHQGSPGKGWKWGGCSEDIEFGGMVSREFADARENRPDVRSAMNRHNNEAGRQDKYDSASEMVVEKHRESRGWVETLRPRYTYFKVPTERDLVYYEASPNFCEPNPETGSFGTRDRTCNVSSHGIDGCDLLCCGRGHNARAERRREKCRCVFHWCCYVSCQECTRVYDVHTCK

SEQ ID NO: 165 - DNA, 1194 bp, Homo sapiens
  CDS (28)..(1164)
gatggcccactcggatacttcttactgatggccccactcggatacttcttactgatggccccactcggatacttcttactgatggccccactcggatacttcttactgatggccccactcggatacttcttactcctctgcagcctgaagcaggctctgggcagctacccgatctggtggtcgctggctgttgggccacagtattcctccctgggctcgcagcccatcctgtgtgccagcatcccgggcctggtccccaagcagctccgcttctgcaggaactacgtggagatcatgcccagcgtggccgagggcatcaagattggcatccaggagtgccagcaccagttccgcggccgccggtggaactgcaccaccgtccacgacagcctggccatcttcgggcccgtgctggacaaagctaccagggagtcggcctttgtccacgccattgcctcagccggtgtggcctttgcagtgacacgctcatgtgcagaaggcacggccgccatctgtggctgcagcagccgccaccagggctcaccgggcaagggctggaagtggggtggctgtagcgaggacatcgagtttggtgggatggtgtctcgggagttcgccgacgcccgggagaaccggccagatgcccgctcagccatgaaccgccacaacaacgaggctgggcgccaggccatcgccagccacatgcacctcaagtgcaagtgccacgggctgtcgggcagctgcgaggtgaagacatgctggtggtcgcaacccgacttccgcgccatcggtgacttcctcaaggacaagtacgacagcgcctcggagatggtggtggagaagcaccgggagtcccgcggctgggtggagaccctgcggccgcgctacacctacttcaaggtgcccacggagcgcgacctggtctactacgaggcctcgcccaacttctgcgagcccaaccctgagacgggctctttcggcacgcgcgaccgcacctgcaacgtcagctcgcacggcatcgacggctgcgacctgctgtgctgcggccgcggccacaacgcgcgagcggagcggcgccgggagaagtgccgctgcgtgttccactggtgctgctacgtcagctgccaggagtgcacgcgcgtctacgacgtgcacacctgcaagtaggcacgtgcacacctgcaagtaggcatc

SEQ ID NO: 166 - protein, 379 aa, Homo sapiens
MAPLGYFLLMAPLGYFLLMAPLGYFLLMAPLGYFLLLCSLKQALGSYPIWWSLAVGPQYSSLGSQPILCASIPGLVPKQLRFCRNYVEIMPSVAEGIKIGIQECQHQFRGRRWNCTTVHDSLAIFGPVLDKATRESAFVHAIASAGVAFAVTRSCAEGTAAICGCSSRHQGSPGKGWKWGGCSEDIEFGGMVSREFADARENRPDARSAMNRHNNEAGRQAIASHMHLKCKCHGLSGSCEVKTCWWSQPDFRAIGDFLKDKYDSASEMVVEKHRESRGWVETLRPRYTYFKVPTERDLVYYEASPNFCEPNPETGSFGTRDRTCNVSSHGIDGCDLLCCGRGHNARAERRREKCRCVFHWCCYVSCQECTRVYDVHTCK

SEQ ID NO: 167 - DNA, 1082 bp, Homo sapiens
  CDS (16)..(1071)
ccctctcgcgcggcgatggccccactcggatacttcttactcctctgcagcctgaagcaggctctgggcagctacccgatctggtggtcgctggctgttgggccacagtattcctccctgggctcgcagcccatcctgtgtgccagcatcccgggcctggtccccaagcagctccgcttctgcaggaactacgtggagatcatgcccagcgtggccgagggcatcaagattggcatccaggagtgccagcaccagttccgcggccgccggtggaactgcaccaccgtccacgacagcctggccatcttcgggcccgtgctggacaaagctaccagggagtcggcctttgtccacgccattgcctcagccggtgtggcctttgcagtgacacgctcatgtgcagaaggcacggccgccatctgtggctgcagcagccgccaccagggctcaccaggcaagggctggaagtggggtggctgtagcgaggacatcgagtttggtgggatggtgtctcgggagttcgccgacgcccgggagaaccggccagatgcccgctcagccatgaaccgccacaacaacgaggctgggcgccaggccatcgccagccacatgcacctcaagtgcaagtgccacgggctgtcgggcagctgcgaggtgaagacatgctggtggtcgcaacccgacttccgcgccatcggtgacttcctcaaggacaagtacgacagcgcctcggagatggtggtggagaagcaccgggagtcccgcggctgggtggagaccctgcggccgcgctacacctacttcaaggtgcccacggagcgcgacctggtctactacgaggcctcgcccaacttctgcgagcccaaccctgagacgggctccttcggcacgcgcgaccgcacctgcaacgtcagctcgcacggcatcgacggctgcgacctgctgtgctgcggccgcggccacaacgcgcgagcggagcggcgccgggagaagtgccgctgcgtgttccactggtgctgctacgtcagctgccaggagtgcacgcgcgtctacgacgtgcacacctgcaagtaggcaccggc

SEQ ID NO: 168 - protein, 352 aa, Homo sapiens; identical to SEQ ID NO: 140

SEQ ID NO: 169 - DNA, 1076 bp, Homo sapiens
  CDS (2)..(1057)
gatggccccactcggatacttcttactcctctgcagcctgaagcaggctctgggcagctacccgatctggtggtcgctggctgttgggccacagtattcctccctgggctcgcagcccatcctgtgtgccagcatcccgggcctggtccccaagcagctccgcttctgcaggaactacgtggagatcatgcccagcgtggccgagggcatcaagattggcatccaggagtgccagcaccagttccgcggccgccggtggaactgcaccaccgtccacgacagcctggccatcttcgggcccgtgctggacaaagctaccagggagtcggcctttgtccacgccattgcctcagccggtgtggcctttgcagtgacacgctcatgtgcagaaggcacggccgccatctgtggctgcagcagccgccaccagggctcaccaggcaagggctggaagtggggtggctgtagcgaggacatcgagtttggtgggatggtgtctcgggagttcgccgacgcccgggagaaccggccagatgcccgctcagccatgaaccgccacaacaacgaggctgggcgccaggccatcgccagccacatgcacctcaagtgcaagtgccacgggctgtcgggcagctgcgaggtgaagacatgctggtggtcgcaacccgacttccgcgccatcggtgacttcctcaaggacaagtacgacagcgcctcggagatggtggtggagaagcaccgggagtcccgcggctgggtggagaccctgcggccgcgctacacctacttcaaggtgcccacggagcgcgacctggtctactacgaggcctcgcccaacttctgcgagcccaaccctgagacgggctccttcggcacgcgcgaccgcacctgcaacgtcagctcgcacggcatcgacggctgcgacctgctgtgctgcggccgcggccacaacgcgcgagcggagcggcgccgggagaagtgccgctgcgtgttccactggtgctgctacgtcagctgccaggagtgcacgcgcgtctacgacgtgcacacctgcaagtagaagggcgaattccgcc

SEQ ID NO: 170 - protein, 352 aa, Homo sapiens; identical to SEQ ID NO: 140

SEQ ID NO: 171 - DNA, 1194 bp, Homo sapiens; identical to SEQ ID NO: 165
  CDS (28)..(1164)

SEQ ID NO: 172 - protein, 379 aa, Homo sapiens; identical to SEQ ID NO: 166

SEQ ID NO: 173 - DNA, 1060 bp, Homo sapiens; identical to SEQ ID NO: 145
  CDS (2)..(1057)

SEQ ID NO: 174 - protein, 352 aa, Homo sapiens; identical to SEQ ID NO: 140

SEQ ID NO: 175 - DNA, 1060 bp, Homo sapiens; identical to SEQ ID NO: 145
  CDS (2)..(1057)

SEQ ID NO: 176 - protein, 352 aa, Homo sapiens; identical to SEQ ID NO: 140

SEQ ID NO: 177 - DNA, 1116 bp, Homo sapiens
  CDS (31)..(1086)
tcccggccctccgcgccctctcgcgcggcgatggccccactcggatacttcttactcctctgcagcctgaagcaggctctgggcagctacccgatctggtggtcgctggctgttgggccacagtattcctccctgggctcgcagcccaccctgtgtgccagcatcccgggcctggtccccaagcagctccgcttctgcaggaactacgtggagatcatgcccagcgtggccgagggcatcaagattggcatccaggagtgccagcaccagttccgcggccgccggtggaactgcaccaccgtccacgacagcctggccatcttcgggcccgtgctggacaaagctaccagggagtcggcctttgtccacgccattgcctcagccggtgtggcctttgcagtgacacgctcatgtgcagaaggcacggccgccatctgtggctgcagcagccgccaccagggctcaccaggcaagggctggaagtggggtggctgtagcgaggacatcgagtttggtgggatggtgtctcgggagttcgccgacgcccgggagaaccggccagatgcccgctcagccatgaaccgccacaacaacgaggctgggcgccaggccatcgccagccacatgcacctcaagtgcaagtgccacgggctgtcgggcagctgcgaggtgaagacatgctggtggtcgcaacccgacttccgcgccatcggtgacttcctcaaggacaagtacgacagcgcctcggagatggtggtggagaagcaccgggagtcccgcggctgggtggagaccctgcggccgcgctacacctacttcaaggtgcccacggagcgcgacctggtctactacgaggcctcgcccaacttctgcgagcccaaccctgagacgggctccttcggcacgcgcgaccgcacctgcaacgtcagctcgcacggcatcgacggctgcgacctgctgtgctgcggccgcggccacaacgcgcgagcggagcggcgccgggagaagtgccgctgcgtgttccactggtgctgctacgtcagctgccaggagtgcacgcgcgtctacgacgtgcacacctgcaagtaggcaccggccgcggctccccctggacgg

SEQ ID NO: 178 - protein, 352 aa, Homo sapiens
MAPLGYFLLLCSLKQALGSYPIWWSLAVGPQYSSLGSQPTLCASIPGLVPKQLRFCRNYVEIMPSVAEGIKIGIQECQHQFRGRRWNCTTVHDSLAIFGPVLDKATRESAFVHAIASAGVAFAVTRSCAEGTAAICGCSSRHQGSPGKGWKWGGCSEDIEFGGMVSREFADARENRPDARSAMNRHNNEAGRQAIASHMHLKCKCHGLSGSCEVKTCWWSQPDFRAIGDFLKDKYDSASEMVVEKHRESRGWVETLRPRYTYFKVPTERDLVYYEASPNFCEPNPETGSFGTRDRTCNVSSHGIDGCDLLCCGRGHNARAERRREKCRCVFHWCCYVSCQECTRVYDVHTCK

SEQ ID NO: 179 - DNA, 1116 bp, Homo sapiens
  CDS (31)..(1086)
tcccggccctccgcgccctctcgcgcggcgatggccccactcggatacttcttactcctctgcagcctgaagcaggctctgggcagctacccgatctggtggtcgctggctgttgggccacagtattcctccctgggctcgcagcccatcctgtgtgccggcatcccgggcctggtccccaagcagctccgcttctgcaggaactacgtggagatcatgcccagcgtggccgagggcatcaagattggcatccaggagtgccagcaccagttccgcggccgccggtggaactgcaccaccgtccacgacagcctggccatcttcgggcccgtgctggacaaagctaccagggagtcggcctttgtccacgccattgcctcagccggtgtggcctttgcagtgacacgctcatgtgcagaaggcacggccgccatctgtggctgcagcagccgccaccagggctcaccaggcaagggctggaagtggggtggctgtagcgaggacatcgagtttggtgggatggtgtctcgggagttcgccgacgcccgggagaaccggccagatgcccgctcagccatgaaccgccacaacaacgaggctgggcgccaggccatcgccagccacatgcacctcaagtgcaagtgccacgggctgtcgggcagctgcgaggtgaagacatgctggtggtcgcaacccgacttccgcgccatcggtgacttcctcaaggacaagtacgacagcgcctcggagatggtggtggagaagcaccgggagtcccgcggctgggtggagaccctgcggccgcgctacacctacttcaaggtgcccacggagcgcgacctggtctactacgaggcctcgcccaacttctgcgagcccaaccctgagacgggctccttcggcacgcgcgaccgcacctgcaacgtcagctcgcacggcatcgacggctgcgacctgctgtgctgcggccgcggccacaacgcgcgagcggagcggcgccgggagaagtgccgctgcgtgttccactggtgctgctacgtcagctgccaggagtgcacgcgcgtctacgacgtgcacacctgcaagtaggcaccggccgcggctccccctggacgg

SEQ ID NO: 180 - protein, 352 aa, Homo sapiens
MAPLGYFLLLCSLKQALGSYPIWWSLAVGPQYSSLGSQPILCAGIPGLVPKQLRFCRNYVEIMPSVAEGIKIGIQECQHQFRGRRWNCTTVHDSLAIFGPVLDKATRESAFVHAIASAGVAFAVTRSCAEGTAAICGCSSRHQGSPGKGWKWGGCSEDIEFGGMVSREFADARENRPDARSAMNRHNNEAGRQAIASHMHLKCKCHGLSGSCEVKTCWWSQPDFRAIGDFLKDKYDSASEMVVEKHRESRGWVETLRPRYTYFKVPTERDLVYYEASPNFCEPNPETGSFGTRDRTCNVSSHGIDGCDLLCCGRGHNARAERRREKCRCVFHWCCYVSCQECTRVYDVHTCK

SEQ ID NO: 181 - DNA, 1116 bp, Homo sapiens
  CDS (31)..(1086)
tcccggccctccgcgccctctcgcgcggcgatggccccactcggatacttcttactcctctgcagcctgaagcaggctctgggcagctacccgatctggtggtcgctggctgttgggccacagtattcctccctgggctcgcagcccatcctgtgtgccagcatcccgggcctggtccccaagcagctccgcttctgcaggaactacgtggagatcatgcccagcgtggccgagggcatcaagattggcatccaggagtgccagcaccagttccgcggccgccggtggaactgcaccaccgtccacgacagcctggccatcttcgggcccgtgctggacaaagctaccagggagtcggcctttgtccacgccattgcctcagccggtgtggcctttgcagtgacacgctcatgtgcagaaggcacggccaccatctgtggctgcagcagccgccaccagggctcaccaggcaagggctggaagtggggtggctgtagcgaggacatcgagtttggtgggatggtgtctcgggagttcgccgacgcccgggagaaccggccagatgcccgctcagccatgaaccgccacaacaacgaggctgggcgccaggccatcgccagccacatgcacctcaagtgcaagtgccacgggctgtcgggcagctgcgaggtgaagacatgctggtggtcgcaacccgacttccgcgccatcggtgacttcctcaaggacaagtacgacagcgcctcggagatggtggtggagaagcaccgggagtcccgcggctgggtggagaccctgcggccgcgctacacctacttcaaggtgcccacggagcgcgacctggtctactacgaggcctcgcccaacttctgcgagcccaaccctgagacgggctccttcggcacgcgcgaccgcacctgcaacgtcagctcgcacggcatcgacggctgcgacctgctgtgctgcggccgcggccacaacgcgcgagcggagcggcgccgggagaagtgccgctgcgtgttccactggtgctgctacgtcagctgccaggagtgcacgcgcgtctacgacgtgcacacctgcaagtaggcaccggccgcggctccccctggacgg

SEQ ID NO: 182 - protein, 352 aa, Homo sapiens
MAPLGYFLLLCSLKQALGSYPIWWSLAVGPQYSSLGSQPILCASIPGLVPKQLRFCRNYVEIMPSVAEGIKIGIQECQHQFRGRRWNCTTVHDSLAIFGPVLDKATRESAFVHAIASAGVAFAVTRSCAEGTATICGCSSRHQGSPGKGWKWGGCSEDIEFGGMVSREFADARENRPDARSAMNRHNNEAGRQAIASHMHLKCKCHGLSGSCEVKTCWWSQPDFRAIGDFLKDKYDSASEMVVEKHRESRGWVETLRPRYTYFKVPTERDLVYYEASPNFCEPNPETGSFGTRDRTCNVSSHGIDGCDLLCCGRGHNARAERRREKCRCVFHWCCYVSCQECTRVYDVHTCK

SEQ ID NO: 183 - DNA, 1116 bp, Homo sapiens
  CDS (31)..(1086)
tcccggccctccgcgccctctcgcgcggcgatggccccactcggatacttcttactcctctgcagcctgaagcaggctctgggcagctacccgatctggtggtcgctggctgttgggccacagtattcctccctgggctcgcagcccatcctgtgtgccagcatcccgggcctggtccccaagcagctccgcttctgcaggaactacgtggagatcatgcccagcgtggccgagggcatcaagattggcatccaggagtgccagcaccagttccgcggccgccggtggaactgcaccaccgtccacgacagcctggccatcttcgggcccgtgctggacaaagctaccagggagtcggcctttgtccacgccattgcctcagccggtgtggcctttgcagtgacacgctcatgtgcagaaggcacggccgccatctgtggctgcagcagccgccaccagggctcaccaggcaagggctggaagtggggtggctgtagcgaggacatcgagtttggtgggatggtgtctcgggagttcgccgacgcccgggagaaccggccagatgcccgctcagccatgaaccgccacaacaacgaggctgggcgccaggccatcgccagccacatgcacctcaagtgcaagtgccacgggctgtcgggcagccgcgaggtgaagacatgctggtggtcgcaacccgacttccgcgccatcggtgacttcctcaaggacaagtacgacagcgcctcggagatggtggtggagaagcaccgggagtcccgcggctgggtggagaccctgcggccgcgctacacctacttcaaggtgcccacggagcgcgacctggtctactacgaggcctcgcccaacttctgcgagcccaaccctgagacgggctccttcggcacgcgcgaccgcacctgcaacgtcagctcgcacggcatcgacggctgcgacctgctgtgctgcggccgcggccacaacgcgcgagcggagcggcgccgggagaagtgccgctgcgtgttccactggtgctgctacgtcagctgccaggagtgcacgcgcgtctacgacgtgcacacctgcaagtaggcaccggccgcggctccccctggacgg

SEQ ID NO: 184 - protein, 352 aa, Homo sapiens
MAPLGYFLLLCSLKQALGSYPIWWSLAVGPQYSSLGSQPILCASIPGLVPKQLRFCRNYVEIMPSVAEGIKIGIQECQHQFRGRRWNCTTVHDSLAIFGPVLDKATRESAFVHAIASAGVAFAVTRSCAEGTAAICGCSSRHQGSPGKGWKWGGCSEDIEFGGMVSREFADARENRPDARSAMNRHNNEAGRQAIASHMHLKCKCHGLSGSREVKTCWWSQPDFRAIGDFLKDKYDSASEMVVEKHRESRGWVETLRPRYTYFKVPTERDLVYYEASPNFCEPNPETGSFGTRDRTCNVSSHGIDGCDLLCCGRGHNARAERRREKCRCVFHWCCYVSCQECTRVYDVHTCK

SEQ ID NO: 185 - DNA, 1116 bp, Homo sapiens
  CDS (31)..(1086)
tcccggccctccgcgccctctcgcgcggcgatggccccactcggatacttcttactcctctgcagcctgaagcaggctctgggcagctacccgatctggtggtcgctggctgttgggccacagtattcctccctgggctcgcagcccatcctgtgtgccagcatcccgggcctggtccccaagcagctccgcttctgcaggaactacgtggagatcatgcccagcgtggccgagggcatcaagattggcatccaggagtgccagcaccagttccgcggccgccggtggaactgcaccaccgtccacgacagcctggccatcttcgggcccgtgctggacaaagctaccagggagtcggcctttgtccacgccattgcctcagccggtgtggcctttgcagtgacacgctcatgtgcagaaggcacggccgccatctgtggctgcagcagccgccaccagggctcaccaggcaagggctggaagtggggtggctgtagcgaggacatcgagtttggtgggatggtgtctcgggagttcgccgacgcccgggagaaccggccagatgcccgctcagccatgaaccgccacaacaacgaggctgggcgccaggccatcgccagccacatgcacctcaagtgcaagtgccacgggctgtcgggcagctgcgaggtgaagacatgctggtggtcgcaacccgacttccgcgccatcggtgacttcctcaaggacaggtacgacagcgcctcggagatggtggtggagaagcaccgggagtcccgcggctgggtggagaccctgcggccgcgctacacctacttcaaggtgcccacggagcgcgacctggtctactacgaggcctcgcccaacttctgcgagcccaaccctgagacgggctccttcggcacgcgcgaccgcacctgcaacgtcagctcgcacggcatcgacggctgcgacctgctgtgctgcggccgcggccacaacgcgcgagcggagcggcgccgggagaagtgccgctgcgtgttccactggtgctgctacgtcagctgccaggagtgcacgcgcgtctacgacgtgcacacctgcaagtaggcaccggccgcggctccccctggacgg

SEQ ID NO: 186 - protein, 352 aa, Homo sapiens
MAPLGYFLLLCSLKQALGSYPIWWSLAVGPQYSSLGSQPILCASIPGLVPKQLRFCRNYVEIMPSVAEGIKIGIQECQHQFRGRRWNCTTVHDSLAIFGPVLDKATRESAFVHAIASAGVAFAVTRSCAEGTAAICGCSSRHQGSPGKGWKWGGCSEDIEFGGMVSREFADARENRPDARSAMNRHNNEAGRQAIASHMHLKCKCHGLSGSCEVKTCWWSQPDFRAIGDFLKDRYDSASEMVVEKHRESRGWVETLRPRYTYFKVPTERDLVYYEASPNFCEPNPETGSFGTRDRTCNVSSHGIDGCDLLCCGRGHNARAERRREKCRCVFHWCCYVSCQECTRVYDVHTCK

SEQ ID NO: 187 - DNA, 1116 bp, Homo sapiens
  CDS (31)..(1086)
tcccggccctccgcgccctctcgcgcggcgatggccccactcggatacttcttactcctctgcagcctgaagcaggctctgggcagctacccgatctggtggtcgctggctgttgggccacagtattcctccctgggctcgcagcccatcctgtgtgccagcatcccgggcctggtccccaagcagctccgcttctgcaggaactacgtggagatcatgcccagcgtggccgagggcatcaagattggcatccaggagtgccagcaccagttccgcggccgccggtggaactgcaccaccgtccacgacagcctggccatcttcgggcccgtgctggacaaagctaccagggagtcggcctttgtccacgccattgcctcagccggtgtggcctttgcagtgacacgctcatgtgcagaaggcacggccgccatctgtggctgcagcagccgccaccagggctcaccaggcaagggctggaagtggggtggctgtagcgaggacatcgagtttggtgggatggtgtctcgggagttcgccgacgcccgggagaaccggccagatgcccgctcagccatgaaccgccacaacaacgaggctgggcgccaggccatcgccagccacatgcacctcaagtgcaagtgccacgggctgtcgggcagctgcgaggtgaagacatgctggtggtcgcaacccgacttccgcgccatcggtgacttcctcaaggacaagtacgacagcgcctcggagatggtggtggagaagcaccgggagtcccgcggctgggtggagaccctgcggccgcgctacacctacttcaaggtgcccacggagcgcgacctggtctactacgaggcctcgcccaacttctgcgagcccaaccctgagacgggccccttcggcacgcgcgaccgcacctgcaacgtcagctcgcacggcatcgacggctgcgacctgctgtgctgcggccgcggccacaacgcgcgagcggagcggcgccgggagaagtgccgctgcgtgttccactggtgctgctacgtcagctgccaggagtgcacgcgcgtctacgacgtgcacacctgcaagtaggcaccggccgcggctccccctggacgg

SEQ ID NO: 188 - protein, 352 aa, Homo sapiens
MAPLGYFLLLCSLKQALGSYPIWWSLAVGPQYSSLGSQPILCASIPGLVPKQLRFCRNYVEIMPSVAEGIKIGIQECQHQFRGRRWNCTTVHDSLAIFGPVLDKATRESAFVHAIASAGVAFAVTRSCAEGTAAICGCSSRHQGSPGKGWKWGGCSEDIEFGGMVSREFADARENRPDARSAMNRHNNEAGRQAIASHMHLKCKCHGLSGSCEVKTCWWSQPDFRAIGDFLKDKYDSASEMVVEKHRESRGWVETLRPRYTYFKVPTERDLVYYEASPNFCEPNPETGPFGTRDRTCNVSSHGIDGCDLLCCGRGHNARAERRREKCRCVFHWCCYVSCQECTRVYDVHTCK

SEQ ID NO: 189 - DNA, 1116 bp, Homo sapiens
  CDS (31)..(1086)
tcccggccctccgcgccctctcgcgcggcgatggccccactcggatacttcttactcctctgcagcctgaagcaggctctgggcagctacccgatctggtggtcgctggctgttgggccacagtattcctccctgggctcgcagcccatcctgtgtgccagcatcccgggcctggtccccaagcagctccgcttctgcaggaactacgtggagatcatgcccagcgtggccgagggcatcaagattggcatccaggagtgccagcaccagttccgcggccgccggtggaactgcaccaccgtccacgacagcctggccatcttcgggcccgtgctggacaaagctaccagggagtcggcctttgtccacgccattgcctcagccggtgtggcctttgcagtgacacgctcatgtgcagaaggcacggccgccatctgtggctgcagcagccgccaccagggctcaccaggcaagggctggaagtggggtggctgtagcgaggacatcgagtttggtgggatggtgtctcgggagttcgccgacgcccgggagaaccggccagatgcccgctcagccatgaaccgccacaacaacgaggctgggcgccaggccatcgccagccacatgcacctcaagtgcaagtgccacgggctgtcgggcagctgcgaggtgaagacatgctggtggtcgcaacccgacttccgcgccatcggtgacttcctcaaggacaagtacgacagcgcctcggagatggtggtggagaagcaccgggagtcccgcggctgggtggagaccctgcggccgcgctacacctacttcaaggtgcccacggagcgcgacctggtctactacgaggcctcgcccaacttctgcgagcccaaccctgagacgggctccttcggcacgcgcgaccgcacctgcaacgtcagctcgcacggcatcgacggctgcgacctgctgcgctgcggccgcggccacaacgcgcgagcggagcggcgccgggagaagtgccgctgcgtgttccactggtgctgctacgtcagctgccaggagtgcacgcgcgtctacgacgtgcacacctgcaagtaggcaccggccgcggctccccctggacgg

SEQ ID NO: 190 - protein, 352 aa, Homo sapiens
MAPLGYFLLLCSLKQALGSYPIWWSLAVGPQYSSLGSQPILCASIPGLVPKQLRFCRNYVEIMPSVAEGIKIGIQECQHQFRGRRWNCTTVHDSLAIFGPVLDKATRESAFVHAIASAGVAFAVTRSCAEGTAAICGCSSRHQGSPGKGWKWGGCSEDIEFGGMVSREFADARENRPDARSAMNRHNNEAGRQAIASHMHLKCKCHGLSGSCEVKTCWWSQPDFRAIGDFLKDKYDSASEMVVEKHRESRGWVETLRPRYTYFKVPTERDLVYYEASPNFCEPNPETGSFGTRDRTCNVSSHGIDGCDLLRCGRGHNARAERRREKCRCVFHWCCYVSCQECTRVYDVHTCK

SEQ ID NO: 191 - DNA, 1116 bp, Homo sapiens
  CDS (31)..(1086)
tcccggccctccgcgccctctcgcgcggcgatggccccactcggatacttcttactcctctgcagcctgaagcaggctctgggcagctacccgatctggtggtcgctggctgttgggccacagtattcctccctgggctcgcagcccatcctgtgtgccagcatcccgggcctggtccccaagcagctccgcttctgcaggaactacgtggagatcatgcccagcgtggccgagggcatcaagattggcatccaggagtgccagcaccagttccgcggccgccggtggaactgcaccaccgtccacgacagcctggccatcttcgggcccgtgctggacaaagctaccagggagtcggcctttgtccacgccattgcctcagccggtgtggcctttgcagtgacacgctcatgtgcagaaggcacggccgccatctgtggctgcagcagccgccaccagggctcaccaggcaagggctggaagtggggtggctgtagcgaggacatcgagtttggtgggatggtgtctcgggagttcgccgacgcccgggagaaccggccagatgcccgctcagccatgaaccgccacaacaacgaggctgggcgccaggccatcgccagccacatgcacctcaagtgcaagtgccacgggctgtcgggcagctgcgaggtgaagacatgctggtggtcgcaacccgacttccgcgccatcggtgacttcctcaaggacaagtacgacagcgcctcggagatggtggtggagaagcaccgggagtcccgcggctgggtggagaccctgcggccgcgctacacctacttcaaggtgcccacggagcgcgacctggtctactacgaggcctcgcccaacttctgcgagcccaaccctgagacgggctccttcggcacgcgcgaccgcacctgcaacgtcagctcgcacggcatcgacggctgcgacctgctgtgctgcggccgcggccacaacgcgcgagcggagcggcgccgggagaagtgccgctgcgtgttccactggtgctgctacgtcagctgccaggagtgcacgcgcgtctacgacgcgcacacctgcaagtaggcaccggccgcggctccccctggacgg

SEQ ID NO: 192 - protein, 352 aa, Homo sapiens
MAPLGYFLLLCSLKQALGSYPIWWSLAVGPQYSSLGSQPILCASIPGLVPKQLRFCRNYVEIMPSVAEGIKIGIQECQHQFRGRRWNCTTVHDSLAIFGPVLDKATRESAFVHAIASAGVAFAVTRSCAEGTAAICGCSSRHQGSPGKGWKWGGCSEDIEFGGMVSREFADARENRPDARSAMNRHNNEAGRQAIASHMHLKCKCHGLSGSCEVKTCWWSQPDFRAIGDFLKDKYDSASEMVVEKHRESRGWVETLRPRYTYFKVPTERDLVYYEASPNFCEPNPETGSFGTRDRTCNVSSHGIDGCDLLCCGRGHNARAERRREKCRCVFHWCCYVSCQECTRVYDAHTCK

SEQ ID NO: 193 - DNA, 795 bp, Homo sapiens
  CDS (28)..(783)
ggtgtggtgatgctgctggtgctggtggtgctcatccccgtgctggtgagctcgggcggcccggaaggccactatgagatgctgggcacctgccgcatggtgtgcgacccctaccccgcgcggggccccggcgccggcgcgcggaccgacggcggcgacgccctgagcgagcagagcggcgcgcccccgccttccacgctggtgcagggcccccaggggaagccgggccgcaccggcaagcccggccctccggggcctcccggggacccaggtcctcccggccctgtggggccgccgggggagaagggtgagccaggcaagccgggccctccggggctgccgggcgcggggggcagcggcgccatcagcactgccacctacaccacggtgccgcgcgtggccttctacgccggcctcaagaacccccacgagggttacgaggtactcaagtttgacgacgtggtcaccaacctaggcaacaactacgacgcggccagcggcaagttaacgtgcaacattcccggcacctactttttcacctaccatgtcctcatgcgcggcggcgacggcaccagtatgtgggcagacctctgcaagaatggccaggtgcgggccagtgctattgcccaggacgcggaccagaactacgactacgccagcaacagcgtgatcctgcacctggacgccggcgacgaggtcttcatcaagctggatggaggcaaagcacacggcggcaacagcaacaaatacagcacgttctctggcttcatcatctactccgactgagctccccac

SEQ ID NO: 194 - protein, 252 aa, Homo sapiens
VLIPVLVSSGGPEGHYEMLGTCRMVCDPYPARGPGAGARTDGGDALSEQSGAPPPSTLVQGPQGKPGRTGKPGPPGPPGDPGPPGPVGPPGEKGEPGKPGPPGLPGAGGSGAISTATYTTVPRVAFYAGLKNPHEGYEVLKFDDVVTNLGNNYDAASGKLTCNIPGTYFFTYHVLMRGGDGTSMWADLCKNGQVRASAIAQDADQNYDYASNSVILHLDAGDEVFIKLDGGKAHGGNSNKYSTFSGFIIYSD

SEQ ID NO: 195 - DNA, 387 bp, Homo sapiens
  CDS (1)..(387)
ggatccgccttctacgccggcctcaagaacccccacgagggttacgaggtactcaagtttgacgacgtggtcaccaacctaggtaacaactacgacgcggccagcggcgagtttacgtgcaacattcccggcacctactttttcacctaccatgtcctcatgcgcggcggcgacggcaccagtatgtgggcagacctctgcaagaatggccaggtgcgggccagtgctattgcccaggacgcggaccagaactacgactacgccagcagcagcgtgatcctgcacctggacgccggtgacgaggtcttcatcaagctggatggaggcaaagcacacggcggcaacagcaacaaatacagcacgttctctggcttcatcatcctcgag

SEQ ID NO: 196 - protein, 129 aa, Homo sapiens
GSAFYAGLKNPHEGYEVLKFDDVVTNLGNNYDAASGEFTCNIPGTYFFTYHVLMRGGDGTSMWADLCKNGQVRASAIAQDADQNYDYASSSVILHLDAGDEVFIKLDGGKAHGGNSNKYSTFSGFIILE

SEQ ID NO: 197 - DNA, 387 bp, Homo sapiens
  CDS (1)..(387)
ggatccgccttctacgccggcctcaagaacccccacgagggttacgaggtactcaagtttgacgacgtggtcaccaacctaggcaacaactacgacgcggccagcggcaagtttacgtgcaacattcccggcacctactttttcacctaccatgtcctcatgcgcggcggcgacggcaccagtatgtgggcagacctctgcaagaatggccaggtgcgggccagtgctattgcccaggacgcggaccagaactacgactacgccagcaacagcgtgatcatgcacctggacgccggcgacgaggtcttcatcaagctggatggaggcaaagcacacggcggcaacagcaacaaatacagcacgttctctggcttcatcatcctcgag

SEQ ID NO: 198 - protein, 129 aa, Homo sapiens
GSAFYAGLKNPHEGYEVLKFDDVVTNLGNNYDAASGKFTCNIPGTYFFTYHVLMRGGDGTSMWADLCKNGQVRASAIAQDADQNYDYASNSVIMHLDAGDEVFIKLDGGKAHGGNSNKYSTFSGFIILE

SEQ ID NO: 199 - DNA, 387 bp, Homo sapiens
  CDS (1)..(387)
ggatccgccttctacgccggcctcaagaacccccacgagggttccgaggtactcaagtttgacgacgtggtcaccaacctaggcaacaactacgacgcggccagcggcaagtttacgtgcaacattcccggcacctactttttcacctaccatgtcctcatgcgcggcggcgacggcaccagtatgtgggcagacctctgcaagaatggccaggtgcgggccagtgctattgcccaggacgcggaccagaactacgactacgccagcaacagcgtgatcctgcacctggacgccggcgacgaggtcttcatcaagctggatggaggcaaagcacacggcggcaacagcaacaaatacagcacgttctctggcttcatcatcctcgag

SEQ ID NO: 200 - protein, 129 aa, Homo sapiens
GSAFYAGLKNPHEGSEVLKFDDVVTNLGNNYDAASGKFTCNIPGTYFFTYHVLMRGGDGTSMWADLCKNGQVRASAIAQDADQNYDYASNSVILHLDAGDEVFIKLDGGKAHGGNSNKYSTFSGFIILE

SEQ ID NO: 201 - DNA, 813 bp, Homo sapiens
  CDS (28)..(801)
gcggcggcggccgccgcgggtgtggtgatgctgctggtgctggtggtgctcatccccgtgctggtgagctcgggcggcccggaaggccactatgagatgctgggcacctgccgcatggtgtgcgacccctaccccgcgcggggccccggcgccggcgcgcggaccgacggcggcgacgccctgagcgagcagagcggcgcgcccccgccttccacgctggtgcagggcccccaggggaagccgggccgcaccggcaagcccggccctccggggcctcccggggacccaggtcctcccggccctgtggggccgccgggggagaagggtgagccaggcaagccgggccctccggggctgccgggcgcggggggcagcggcgccatcagcactgccacctacaccacggtgccgcgcgtggccttctacgccggcctcaagaacccccacgagggttacgaggtactcaagtttgacgacgtggtcaccaacctaggcaacaactacgacgcggccagcggcaagttaacgtgcaacattcccggcacctactttttcacctaccatgtcctcatgcgcggcggcgacggcaccagtatgtgggcagacctctgcaagaatggccaggtgcgggccagtgctattgcccaggacgcggaccagaactacgactacgccagcaacagcgtgatcctgcacctggacgccggcgacgaggtcttcatcaagctggatggaggcaaagcacacggcggcaacagcaacaaatacagcacgttctctggcttcatcatctactccgactgagctccccac

SEQ ID NO: 202 - protein, 258 aa, Homo sapiens
MLLVLVVLIPVLVSSGGPEGHYEMLGTCRMVCDPYPARGPGAGARTDGGDALSEQSGAPPPSTLVQGPQGKPGRTGKPGPPGPPGDPGPPGPVGPPGEKGEPGKPGPPGLPGAGGSGAISTATYTTVPRVAFYAGLKNPHEGYEVLKFDDVVTNLGNNYDAASGKLTCNIPGTYFFTYHVLMRGGDGTSMWADLCKNGQVRASAIAQDADQNYDYASNSVILHLDAGDEVFIKLDGGKAHGGNSNKYSTFSGFIIYSD

SEQ ID NO: 203 - DNA, 387 bp, Homo sapiens
  CDS (7)..(381)
ggatccgccttctacgccggcctcaagaacccccacgagggttacgaggtactcaagtttgacgacgtggtcaccaacctaggcaacaactacgacgcggccagcggcaagtttacgtgcaacattcccggcacctactttttcacctaccatgtcctcatgcgcggcggcgacggcaccagtatgtgggcagacctctgcaagaatggccaggtgcgggccagtgctattgcccaggacgcggaccagaactacgactacgccagcaacagcgtgatcctgcacctggacgccggtgacgaggtcttcatcaagctggatggaggcaaagcacacggcggcaacagcaacaaatacagcacgttctctggcttcatcatcctcgag

SEQ ID NO: 204 - protein, 125 aa, Homo sapiens
AFYAGLKNPHEGYEVLKFDDVVTNLGNNYDAASGKFTCNIPGTYFFTYHVLMRGGDGTSMWADLCKNGQVRASAIAQDADQNYDYASNSVILHLDAGDEVFIKLDGGKAHGGNSNKYSTFSGFII

SEQ ID NO: 205 - DNA, 22 bp, Artificial Sequence
  Description of Artifical Sequence:  Primer/Probe
gattgcaacgctgaagtttatg

SEQ ID NO: 206 - DNA, 26 bp, Artificial Sequence
  Description of Artifical Sequence:  Primer/Probe
tctgtcaactgtcaaccactgggaat

SEQ ID NO: 207 - DNA, 22 bp, Artificial Sequence
  Description of Artifical Sequence:  Primer/Probe
gaggccttttcatcagtgagat

SEQ ID NO: 208 - DNA, 19 bp, Artificial Sequence
  Description of Artifical Sequence:  Primer/Probe
acagagcatttggcaagct

SEQ ID NO: 209 - DNA, 27 bp, Artificial Sequence
  Description of Artifical Sequence:  Primer/Probe
tcagtactacaccttctgcacagacac

SEQ ID NO: 210 - DNA, 20 bp, Artificial Sequence
  Description of Artifical Sequence:  Primer/Probe
gttggcccttctgtcttctc

SEQ ID NO: 211 - DNA, 20 bp, Artificial Sequence
  Description of Artifical Sequence:  Primer/Probe
tctcaagcagaaaacatgcc

SEQ ID NO: 212 - DNA, 26 bp, Artificial Sequence
  Description of Artifical Sequence:  Primer/Probe
taggcggccaggatataactgacttc

SEQ ID NO: 213 - DNA, 20 bp, Artificial Sequence
  Description of Artifical Sequence:  Primer/Probe
ggaagacacaaattgcatgg

SEQ ID NO: 214 - DNA, 21 bp, Artificial Sequence
  Description of Artifical Sequence:  Primer/Probe
aactgaaagctctccacctcc

SEQ ID NO: 215 - DNA, 20 bp, Artificial Sequence
  Description of Artifical Sequence:  Primer/Probe
ttgtggccttgggcctcaag

SEQ ID NO: 216 - DNA, 22 bp, Artificial Sequence
  Description of Artifical Sequence:  Primer/Probe
cgcaggacaggtacagattctt

SEQ ID NO: 217 - DNA, 20 bp, Artificial Sequence
  Description of Artifical Sequence:  Primer/Probe
tccacctccaaggagaagaa

SEQ ID NO: 218 - DNA, 26 bp, Artificial Sequence
  Description of Artifical Sequence:  Primer/Probe
tcccaaggccacaggtattttgtcat

SEQ ID NO: 219 - DNA, 21 bp, Artificial Sequence
  Description of Artifical Sequence:  Primer/Probe
acacgcaggacaggtacagat

SEQ ID NO: 220 - DNA, 20 bp, Artificial Sequence
  Description of Artifical Sequence:  Primer/Probe
tccacctccaaggagaagaa

SEQ ID NO: 221 - DNA, 26 bp, Artificial Sequence
  Description of Artifical Sequence:  Primer/Probe
tcccaaggccacaggtattttgtcat

SEQ ID NO: 222 - DNA, 21 bp, Artificial Sequence
  Description of Artifical Sequence:  Primer/Probe
acacgcaggacaggtacagat

SEQ ID NO: 223 - DNA, 20 bp, Artificial Sequence
  Description of Artifical Sequence:  Primer/Probe
tccacctccaaggagaagaa

SEQ ID NO: 224 - DNA, 26 bp, Artificial Sequence
  Description of Artifical Sequence:  Primer/Probe
tcccaaggccacaggtattttgtcat

SEQ ID NO: 225 - DNA, 21 bp, Artificial Sequence
  Description of Artifical Sequence:  Primer/Probe
acacgcaggacaggtacagat

SEQ ID NO: 226 - DNA, 20 bp, Artificial Sequence
  Description of Artifical Sequence:  Primer/Probe
gaatatcacgaaggaagcca

SEQ ID NO: 227 - DNA, 23 bp, Artificial Sequence
  Description of Artifical Sequence:  Primer/Probe
tcctcagctgctccactccgaac

SEQ ID NO: 228 - DNA, 20 bp, Artificial Sequence
  Description of Artifical Sequence:  Primer/Probe
cggaaagtgtcagcagtgat

SEQ ID NO: 229 - DNA, 22 bp, Artificial Sequence
  Description of Artifical Sequence:  Primer/Probe
acaatcactgctgacactttcc

SEQ ID NO: 230 - DNA, 26 bp, Artificial Sequence
  Description of Artifical Sequence:  Primer/Probe
tttccgagtctactccaatttcctcc

SEQ ID NO: 231 - DNA, 22 bp, Artificial Sequence
  Description of Artifical Sequence:  Primer/Probe
cctgtgtacagcttcagctttc

SEQ ID NO: 232 - DNA, 20 bp, Artificial Sequence
  Description of Artifical Sequence:  Primer/Probe
cgtggtcatcaaagcagtgt

SEQ ID NO: 233 - DNA, 25 bp, Artificial Sequence
  Description of Artifical Sequence:  Primer/Probe
tctcaggcttctacgtggccatgaa

SEQ ID NO: 234 - DNA, 20 bp, Artificial Sequence
  Description of Artifical Sequence:  Primer/Probe
tgcagtccacggtgtagagt

SEQ ID NO: 235 - DNA, 21 bp, Artificial Sequence
  Description of Artifical Sequence:  Primer/Probe
tggagatccgctctgtacacg

SEQ ID NO: 236 - DNA, 27 bp, Artificial Sequence
  Description of Artifical Sequence:  Primer/Probe
tcctgaggacactgctttgatgaccac

SEQ ID NO: 237 - DNA, 19 bp, Artificial Sequence
  Description of Artifical Sequence:  Primer/Probe
cggttcatggccacgtaga

SEQ ID NO: 238 - DNA, 20 bp, Artificial Sequence
  Description of Artifical Sequence:  Primer/Probe
tggagatccgctctgtacac

SEQ ID NO: 239 - DNA, 26 bp, Artificial Sequence
  Description of Artifical Sequence:  Primer/Probe
ttcatcaaagcagtgtcctcaggctt

SEQ ID NO: 240 - DNA, 20 bp, Artificial Sequence
  Description of Artifical Sequence:  Primer/Probe
tgcagtccacggtgtagagt

SEQ ID NO: 241 - DNA, 19 bp, Artificial Sequence
  Description of Artifical Sequence:  Primer/Probe
gccccactcggatacttct

SEQ ID NO: 242 - DNA, 26 bp, Artificial Sequence
  Description of Artifical Sequence:  Primer/Probe
ttactcctctgcagcctgaagcaggc

SEQ ID NO: 243 - DNA, 19 bp, Artificial Sequence
  Description of Artifical Sequence:  Primer/Probe
ggaatactgtggcccaaca

SEQ ID NO: 244 - DNA, 19 bp, Artificial Sequence
  Description of Artifical Sequence:  Primer/Probe
cgtgctggacaaagctacc

SEQ ID NO: 245 - DNA, 23 bp, Artificial Sequence
  Description of Artifical Sequence:  Primer/Probe
tagtcggcctttgtccacgccat

SEQ ID NO: 246 - DNA, 18 bp, Artificial Sequence
  Description of Artifical Sequence:  Primer/Probe
gtcactgcaaaggccaca

SEQ ID NO: 247 - DNA, 21 bp, Artificial Sequence
  Description of Artifical Sequence:  Primer/Probe
gcggaccagaactacgactac

SEQ ID NO: 248 - DNA, 23 bp, Artificial Sequence
  Description of Artifical Sequence:  Primer/Probe
tagcaacagcgtgatcctgcacc

SEQ ID NO: 249 - DNA, 20 bp, Artificial Sequence
  Description of Artifical Sequence:  Primer/Probe
tccatccagcttgatgaaga

SEQ ID NO: 250 - DNA, 21 bp, Artificial Sequence
  Description of Artifical Sequence:  Primer/Probe
gcggaccagaactacgactac

SEQ ID NO: 251 - DNA, 23 bp, Artificial Sequence
  Description of Artifical Sequence:  Primer/Probe
tagcaacagcgtgatcctgcacc

SEQ ID NO: 252 - DNA, 20 bp, Artificial Sequence
  Description of Artifical Sequence:  Primer/Probe
tccatccagcttgatgaaga

SEQ ID NO: 253 - DNA, 21 bp, Artificial Sequence
  Description of Artifical Sequence:  Primer/Probe
gcggaccagaactacgactac

SEQ ID NO: 254 - DNA, 23 bp, Artificial Sequence
  Description of Artifical Sequence:  Primer/Probe
tagcaacagcgtgatcctgcacc

SEQ ID NO: 255 - DNA, 20 bp, Artificial Sequence
  Description of Artifical Sequence:  Primer/Probe
tccatccagcttgatgaaga

What is claimed is:

1. An isolated polypeptide comprising the mature form of an amino acid sequence selected from the group consisting of SEQ ID NO:2n, wherein n is an integer between 1 and 102.

2. An isolated polypeptide comprising an amino acid sequence selected from the group consisting of SEQ ID NO:2n, wherein n is an integer between 1 and 102.

3. An isolated polypeptide comprising an amino acid sequence which is at least 95% identical to an amino acid sequence selected from the group consisting of SEQ ID NO:2n, wherein n is an integer between 1 and 102.

4. An isolated polypeptide, wherein the polypeptide comprises an amino acid sequence comprising one or more conservative substitutions in the amino acid sequence selected from the group consisting of SEQ ID NO:2n, wherein n is an integer between 1 and 102.

5. The polypeptide of claim 1 wherein said polypeptide is naturally occurring.

6. A composition comprising the polypeptide of claim 1 and a carrier.

7. A kit comprising, in one or more containers, the composition of claim 6.

8. The use of a therapeutic in the manufacture of a medicament for treating a syndrome associated with a human disease, the disease selected from a pathology associated with the polypeptide of claim 1, wherein the therapeutic comprises the polypeptide of claim 1.

9. A method for determining the presence or amount of the polypeptide of claim 1 in a sample, the method comprising:
(a) providing said sample;
(b) introducing said sample to an antibody that binds immunospecifically to the polypeptide; and
(c) determining the presence or amount of antibody bound to said polypeptide, thereby determining the presence or amount of polypeptide in said sample.

10. A method for determining the presence of or predisposition to a disease associated with altered levels of expression of the polypeptide of claim 1 in a first mammalian subject, the method comprising:
a) measuring the level of expression of the polypeptide in a sample from the first mammalian subject; and
b) comparing the expression of said polypeptide in the sample of step (a) to the expression of the polypeptide present in a control sample from a second mammalian subject known not to have, or not to be predisposed to, said disease, wherein an alteration in the level of expression of the polypeptide in the first subject as compared to the control sample indicates the presence of or predisposition to said disease.

11. A method of identifying an agent that binds to the polypeptide of claim 1, the method comprising:
(a) introducing said polypeptide to said agent; and
(b) determining whether said agent binds to said polypeptide.

12. The method of claim 11 wherein the agent is a cellular receptor or a downstream effector.

13. A method for identifying a potential therapeutic agent for use in treatment of a pathology, wherein the pathology is related to aberrant expression or aberrant physiological interactions of the polypeptide of claim 1, the method comprising:
(a) providing a cell expressing the polypeptide of claim 1 and having a property or function ascribable to the polypeptide;
(b) contacting the cell with a composition comprising a candidate substance; and
(c) determining whether the substance alters the property or function ascribable to the polypeptide; whereby, if an alteration observed in the presence of the substance is not observed when the cell is contacted with a composition in the absence of the substance, the substance is identified as a potential therapeutic agent.

14. A method for screening for a modulator of activity of or of latency or predisposition to a pathology associated with the polypeptide of claim 1, said method comprising:
(a) administering a test compound to a test animal at increased risk for a pathology associated with the polypeptide of claim 1, wherein said test animal recombinantly expresses the polypeptide of claim 1;
(b) measuring the activity of said polypeptide in said test animal after administering the compound of step (a); and
(c) comparing the activity of said polypeptide in said test animal with the activity of said polypeptide in a control animal not administered said polypeptide, wherein a change in the activity of said polypeptide in said test animal relative to said control animal indicates the test compound is a modulator activity of or latency or predisposition to, a pathology associated with the polypeptide of claim 1.

15. The method of claim 14, wherein said test animal is a recombinant test animal that expresses a test protein transgene or expresses said transgene under the control of a promoter at an increased level relative to a wild-type test animal, and wherein said promoter is not the native gene promoter of said transgene.

16. A method for modulating the activity of the polypeptide of claim 1, the method comprising contacting a cell sample expressing the polypeptide of claim 1 with a compound that binds to said polypeptide in an amount sufficient to modulate the activity of the polypeptide.

17. A method of treating or preventing a pathology associated with the polypeptide of claim 1, the method comprising administering the polypeptide of claim 1 to a subject in which such treatment or prevention is desired in an amount sufficient to treat or prevent the pathology in the subject.

18. The method of claim 17, wherein the subject is a human.

19. A method of treating a pathological state in a mammal, the method comprising administering to the mammal a polypeptide in an amount that is sufficient to alleviate the pathological state, wherein the polypeptide is a polypeptide having an amino acid sequence at least 95% identical to a polypeptide comprising the amino acid sequence selected from the group consisting of SEQ ID NO:2n, wherein n is an integer between 1 and 102, or a biologically active fragment thereof.

20. An isolated nucleic acid molecule comprising a nucleic acid sequence selected from the group consisting of SEQ ID NO:2n−1, wherein n is an integer between 1 and 102.

21. The nucleic acid molecule of claim 20, wherein the nucleic acid molecule is naturally occurring.

22. A nucleic acid molecule, wherein the nucleic acid molecule differs by a single nucleotide from a nucleic acid sequence selected from the group consisting of SEQ ID NO: 2n−1, wherein n is an integer between 1 and 102.

23. An isolated nucleic acid molecule encoding the mature form of a polypeptide having an amino acid sequence selected from the group consisting of SEQ ID NO:2n, wherein n is an integer between 1 and 102.

24. A composition comprising an isolated nucleic acid molecule, said molecule comprising a nucleic acid sequence selected from the group consisting of SEQ ID NO: 2n−1, wherein n is an integer between 1 and 102, and a carrier.

25. The nucleic acid molecule of claim 20, wherein said nucleic acid molecule hybridizes under stringent conditions to the nucleotide sequence selected from the group consisting of SEQ ID NO: 2n−1, wherein n is an integer between 1 and 102, or a complement of said nucleotide sequence.

26. A vector comprising the nucleic acid molecule of claim 20.

27. The vector of claim 26, further comprising a promoter operably linked to said nucleic acid molecule.

28. A cell comprising the vector of claim 26.

29. An antibody that immunospecifically binds to the polypeptide of claim 1.

30. The antibody of claim 29, wherein the antibody is a monoclonal antibody.

31. The antibody of claim 29, wherein the antibody is a humanized antibody.

32. A method for determining the presence or amount of the nucleic acid molecule of claim 20 in a sample, the method comprising:
(a) providing said sample;
(b) introducing said sample to a probe that binds to said nucleic acid molecule; and
(c) determining the presence or amount of said probe bound to said nucleic acid molecule, thereby determining the presence or amount of the nucleic acid molecule in said sample.

33. The method of claim 32 wherein presence or amount of the nucleic acid molecule is used as a marker for cell or tissue type.

34. The method of claim 33 wherein the cell or tissue type is cancerous.

35. A method for determining the presence of or predisposition to a disease associated with altered levels of expression of the nucleic acid molecule of claim 20 in a first mammalian subject, the method comprising:
a) measuring the level of expression of the nucleic acid in a sample from the first mammalian subject; and
b) comparing the level of expression of said nucleic acid in the sample of step (a) to the level of expression of the nucleic acid present in a control sample from a second mammalian subject known not to have or not be predisposed to, the disease; wherein an alteration in the level of expression of the nucleic acid in the first subject as compared to the control sample indicates the presence of or predisposition to the disease.

36. A method of producing the polypeptide of claim 1, the method comprising culturing a cell under conditions that lead to expression of the polypeptide, wherein said cell comprises a vector comprising an isolated nucleic acid molecule comprising a nucleic acid sequence selected from the group consisting of SEQ ID NO:2n−1, wherein n is an integer between 1 and 102.

37. The method of claim 36 wherein the cell is a bacterial cell.

38. The method of claim 36 wherein the cell is an insect cell.

39. The method of claim 36 wherein the cell is a yeast cell.

40. The method of claim 36 wherein the cell is a mammalian cell.

41. A method of producing the polypeptide of claim 2, the method comprising culturing a cell under conditions that lead to expression of the polypeptide, wherein said cell comprises a vector comprising an isolated nucleic acid molecule comprising a nucleic acid sequence selected from the group consisting of SEQ ID NO:2n−1, wherein n is an integer between 1 and 102.

42. The method of claim 41 wherein the cell is a bacterial cell.

43. The method of claim 41 wherein the cell is an insect cell.

44. The method of claim 41 wherein the cell is a yeast cell.

45. The method of claim 41 wherein the cell is a mammalian cell.

46. An isolated polypeptide comprising an amino acid sequence at least 95% similar to SEQ ID NO: 4, wherein said amino acid sequence comprises at least one amino acid substitution, wherein said substitution is at the amino acid position selected from the group consisting of 19, 68, 82, 103, 115, 136, 310, 320, 325, 331, 370 and 581 when numbered in accordance with SEQ ID NO: 4.

47. An isolated nucleic acid molecule comprising an nucleic acid sequence at least 95% similar to SEQ ID NO: 3, wherein said nucleic acid sequence comprises at least one nucleic acid substitution, wherein said substitution is at the nucleic acid position selected from the group consisting of 105, 253, 295, 356, 392, 456, 978, 1008, 1023, 1041, 1157 and 1791 when numbered in accordance with SEQ ID NO: 3.

48. An isolated polypeptide comprising an amino acid sequence at least 95% similar to SEQ ID NO: 78, wherein said amino acid sequence comprises at least one amino acid substitution, wherein said substitution is at the amino acid position selected from the group consisting of 77, 91 125, 174, 189 and 203 when numbered in accordance with SEQ ID NO: 78.

49. An isolated nucleic acid molecule comprising an nucleic acid sequence at least 95% similar to SEQ ID NO: 77, wherein said nucleic acid sequence comprises at least one nucleic acid substitution, wherein said substitution is at the nucleic acid position selected from the group consisting of 231, 272, 374, 522, 566 and 608 when numbered in accordance with SEQ ID NO: 77.

50. An isolated polypeptide comprising an amino acid sequence at least 95% similar to SEQ ID NO: 116, wherein said amino acid sequence comprises at least one amino acid substitution, wherein said substitution is at amino acid position 120 when numbered in accordance with SEQ ID NO: 116.

51. An isolated nucleic acid molecule comprising an nucleic acid sequence at least 95% similar to SEQ ID NO: 115, wherein said nucleic acid sequence comprises at least one nucleic acid substitution, wherein said substitution is at nucleic acid position 358 when numbered in accordance with SEQ ID NO: 115.

52. An isolated polypeptide comprising an amino acid sequence at least 95% similar to SEQ ID NO: 32, wherein said amino acid sequence comprises at least one amino acid substitution, wherein said substitution is at the amino acid position selected from the group consisting of 40, 44, 134, 212, 234, 289, 311 and 348 when numbered in accordance with SEQ ID NO: 32.

53. An isolated nucleic acid molecule comprising an nucleic acid sequence at least 95% similar to SEQ ID NO: 31, wherein said nucleic acid sequence comprises at least one nucleic acid substitution, wherein said substitution is at the nucleic acid position selected from the group consisting of 149, 160, 430, 664, 731, 895, 961 and 1073 when numbered in accordance with SEQ ID NO: 31.
